(19) United States
(12) Patent Application Publication
(10) Pub. No.: US 2009/0053248 A1
(43) Pub. Date: Feb. 26, 2009

(54) Compositions and methods for transepithelial molecular transport

(75) Inventors: Lance Simpson, Moorestown, NJ (US); Andrew Maksymowych, Gulph Mills, PA (US); Jong-Beak Park, Voorhees, NJ (US)

Correspondence Address: DRINKER BIDDLE & REATH;ATTN: INTELLECTUAL PROPERTY GROUP, ONE LOGAN SQUARE, 18TH AND CHERRY STREETS, PHILADELPHIA, PA, 19103-6996, US

(73) Assignee: Thomas Jefferson University, Philadelphia, PA (US)

(21) Appl. No.: 12/079,294

(22) Filed: Mar. 25, 2008

Related U.S. Application Data
(62) Division of application No. 10/452,024, filed on Jun. 2, 2003, now abandoned.
(60) Provisional application No. 60/384,949, filed on May 31, 2002.

(51) Int. Cl. A61K 39/385; A61K 39/395; C07K 16/00; A61P 37/04

(52) U.S. Cl. 424/183.1; 424/197.11; 424/194.1; 530/391.7

(57) ABSTRACT

The invention relates to fragments of Clostridium botulinum HC that can be linked with an entity (e.g., an antigen, a particle, or a radionuclide) and used to deliver the entity across a non-keratinized epithelial membrane of an animal. The fragments are useful, for example, for making vaccines, antidotes, and anti-toxins and in situations in which rapid uptake of an agent by an animal is desired.

### CROSS-REFERENCE TO RELATED APPLICATIONS

[0001] This application is a divisional application of copending U.S. patent application Ser. No. 10/452,024, filed on Jun. 2, 2003, which application claims priority under 35 U.S.C. § 119(e) to U.S. provisional patent application Ser. No. 60/384,949, filed May 31, 2002, the contents of each which are incorporated herein by reference.

### STATEMENT REGARDING FEDERALLY SPONSORED RESEARCH OR DEVELOPMENT

[0002] This research was supported in part by U.S. Government funds (National Institutes of Health grant number GM057342).

### INCORPORATION BY REFERENCE OF MATERIAL ON COMPACT DISK

[0003] This application incorporates by reference the Sequence Listing contained on the two compact disks (Copy 1 and Copy 2), filed on Jan. 11, 2007, in the copending parent U.S. patent application Ser. No. 10/452,024, and containing the following file: File name: 08321-0191US1 Substitute sequence listing.txt; created Jan. 3, 2007; 1,064,960 bytes in size.

### BACKGROUND OF THE INVENTION

[0004] Botulinum toxin is the causative agent of botulism and other disorders in humans and other animals (e.g., other mammals, reptiles, birds, and amphibians). The pathological effects of this agent are mediated by a neurotoxin that is able to cross the gut and airway epithelium to enter the general circulation. Once in the circulation, botulinum-neurotoxin (“BoNT”) is able to bind to the presynaptic membrane of neuromuscular junctions and thereafter enter the neuronal cytosol. In the cytosol, BoNT blocks neuronal release of acetylcholine at the neuromuscular junction, causing flaccid paralysis of the muscle.

[0005] BoNT is synthesized as a single-chain inactive propolypeptide having a molecular mass of approximately 150 kilodaltons. Inactive pro-BoNT is activated by proteolytic cleavage of the pro-BoNT by endogenous or exogenous proteases. Cleavage (“nicking”) of the inactive BoNT propeptide yields two polypeptide chains, a heavy chain (“HC”) and a light chain (“LC”). The HC and LC normally remain linked by a disulfide bond that can be severed under reducing conditions, such as those that exist in the interior of an animal cell.

[0006] Several species of Clostridia are presently known to produce the BoNT toxin, including Clostridium botulinum, Clostridium baratii, and Clostridium butyricum. BoNT is presently known to be produced in seven immunologically distinct forms, A, B, C, D, E, F, and G. In nature, each serotype is released from clostridia in association with two classes of proteins (sometimes referred to as the “auxiliary proteins”): (i) a family of hemagglutinins (“HA”) and (ii) a single, nontoxin, non-hemagglutinin protein (“NTNH”).

[0007] BoNT is known to be able to penetrate gut, pulmonary, and other epithelial membranes in order to gain access to the bloodstream. In the bloodstream, BoNT is able to enter neurons at the neuromuscular junction, whereupon the toxin can manifest its characteristic effects.

[0008] The ability of BoNT molecules altered such that some or all of the LC has been deleted to cross epithelial membranes has been described (e.g., U.S. Pat. No. 6,051,239). However, those molecules require production or isolation of intact HC, which has proven impractical for various reasons. Others have attempted to prepare injectable vaccines for preventing botulism using fragments of BoNTs. However, none describes vaccines that prevent botulism which are capable of transcytosing across epithelia.

[0009] A need remains for improved compositions and methods for delivering antigens, drugs, imaging agents, radionuclides, and other agents to the bodies of animals via the epithelium. The invention satisfies this need, at least in part, by providing compositions and methods for delivering entities across animal epithelial membranes.

### BRIEF SUMMARY OF THE INVENTION

[0010] The invention is based on the discovery that carboxyterminal fragments of the HC of Clostridium botulinum neurotoxin (BoNT) have the ability to cross epithelial membranes in animals. A surprising further discovery is that fragments of the HC of BoNT are able to mediate transepithelial transport of a wide range of entities when an entity is linked to the fragment. Thus, the invention relates to compositions that comprise a carboxyterminal fragment of a HC of BoNT (hereinafter “HC”) linked to an entity. The invention also relates to methods of using such compositions.

[0011] In particular, the invention provides a composition for translocating an entity across a non-keratinized epithelium of an animal. The composition comprises an entity linked to a carboxyterminal fragment of the HC of a BoNT. The size of the entity is preferably not greater than the lumenal capacity of vesicles of cells of the epithelium. The selected entity for use in the composition of the invention may be immunogenic, therapeutic, and/or diagnostic in nature.

[0012] For example, within the scope of the invention is contemplated a composition that elicits an immune response (mucosal or systemic) against an antigen in a vertebrate. Such composition may contain at least one epitope of the antigen linked to a carboxyterminal fragment of the HC of a BoNT. The size of the epitope is preferably not greater than the lumenal capacity of vesicles of cells of the epithelium.

[0013] In an embodiment, the invention is a vaccine that includes an antigen linked to a carboxyterminal fragment of HC of a BoNT, wherein the antigen induces protective immunity against a pathogen of a vertebrate when the antigen is delivered to the circulation of the vertebrate. For example, the vaccine may comprise an antigen linked to a carboxyterminal fragment of a HC of a BoNT, wherein the antigen induces protective immunity against Clostridium botulinum neurotoxin in a vertebrate when the antigen is delivered to the circulation of the vertebrate.

[0014] In another aspect of the invention, a method of translocating an entity across a non-keratinized epithelium of an animal is provided. The method includes contacting an epithelium with a composition comprising the entity linked to a carboxyterminal fragment of the HC of a BoNT, wherein the size of the entity is not greater than the lumenal capacity of vesicles of cells of the epithelium.

[0015] Also contemplated are methods of inducing an immune response against an entity in a vertebrate. In such case, the methods involves: a) linking the entity to a carboxyterminal fragment of the HC of a BoNT, wherein the size of the entity is not greater than the lumenal capacity of vesicle cells of the epithelium; and b) contacting the fragment-linked entity with the epithelium.

[0016] Pharmaceutical compositions containing an entity linked to a carboxyterminal fragment of the HC of BoNT are also described herein, as are foodstuffs and translocating polypeptides that may be used in the methods and/or compositions of the invention.

### BRIEF DESCRIPTION OF THE SEVERAL VIEWS OF THE DRAWINGS

[0017] The foregoing summary, as well as the following detailed description of the invention, will be better understood when read in conjunction with the appended drawings. For the purpose of illustrating the invention, there is shown in the drawings embodiments which may be presently preferred. It should be understood, however, that the invention is not limited to the precise arrangements, sequences, compounds, and instrumentalities shown.

[0018] FIG. 1 (consisting of FIGS. 1A to 1BB) is an alignment of the amino acid sequences of the Clostridium botulinum neurotoxin:
[0019] (i) serotype A HC (SEQ ID NO: 1, from GENEBANK™ accession no. Q45894);
[0020] (ii) serotype B HC (SEQ ID NO: 2, from GENEBANK™ accession no. P10844);
[0021] (iii) serotype C HC (SEQ ID NO: 3, from GENEBANK™ accession no. P18640);
[0022] (iv) serotype D HC (SEQ ID NO: 4, from GENEBANK™ accession no. P19321);
[0023] (v) serotype E HC (SEQ ID NO: 5, from GENEBANK™ accession no. P30995);
[0024] (vi) serotype F HC (SEQ ID NO: 6, from GENEBANK™ accession no. P30996); and
[0025] (vii) serotype G HC (SEQ ID NO: 7, from GENEBANK™ accession no. Q60393). In the alignment, the amino acid sequence of the 88 kilodalton fragment of HC (serotype A) (SEQ ID NO: 189) (i.e., the fragment herein designated “88 kHC”, beginning at residue 524) is shown in bold text. The amino acid sequence of the 66 kilodalton fragment of HC (serotype A) (SEQ ID NO: 190) (i.e., the fragment herein designated “66 kHC”, beginning at residue 714) is shown in underlined text (part of which is doubly-underlined). The amino acid sequence of the 50 kilodalton fragment of HC (serotype A) (SEQ ID NO: 191) (i.e., the fragment herein designated “50 kHC”, beginning at residue 886) is shown in doubly-underlined text and the amino acid sequence of a forty-eight kilodalton portion of HC (serotype A) (SEQ ID NO: 169) (i.e., the 5 kHC fragment minus 2 kilodalton of its carboxy terminus, hereinafter designated “48 kHC”, beginning at residue 886 and ending at residue 1343) is shown in italicized text.

[0026] FIG. 2 is a schematic diagram illustrating the structure of native Clostridium botulinum (serotype A), its HC, and the relative positions of each of the fragments designated 88 kHC, 66 kHC, 50 kHC, and of the portion designated 48 kHC.

[0027] FIG. 3 is a Western blot of native botulinum neurotoxin type A (BoNT A) transcytosed in polarized gut epithelial cell cultures (T-84). The lanes represent: (A) Pre-transcytosis control for native toxin. (B) Native toxin transcytosed through T-84 cells (collected from basal chamber).

[0028] FIG. 4 is a Western blot of native botulinum neurotoxin type A transcytosed in polarized, canine kidney epithelial cell cultures (MDCK). The lanes represent: (A) Pre-transcytosis control for native toxin. (B) Native toxin transcytosed through MDCK cells (collected from basal chamber).

[0029] FIG. 5 is a Western blot of HC(HC) transcytosed in T-84 polarized epithelial cell cultures. The lanes represent: (A) Pre-transcytosis control for HC. (B) HC transcytosed through T-84 cells (collected from basal chamber).

[0030] FIG. 6 is a Western blot of HC transcytosed in polarized, canine kidney epithelial cell cultures (MDCK). The lanes represent: (A) Pre-transcytosis control for HC. (B) HC transcytosed through MDCK cells (collected from basal chamber).

[0031] FIG. 7 is a Western blot of 66 kDa HC carboxyterminal fragment (66 kHC) transcytosed in T-84 polarized epithelial cell cultures. The lanes represent: (A) Pre-transcytosis control for the 66 kHC. (B) The 66 kHC transcytosed through T-84 cells (collected from basal chamber).

[0032] FIG. 8 is a Western blot of 66 kDa HC carboxyterminal fragment (66 kHC) transcytosed in MDCK polarized canine kidney epithelial cell cultures. The lanes represent: (A) Pre-transcytosis control for the 66 kHC. (B) The 66 kHC transcytosed through MDCK cells (collected from basal chamber).

[0033] FIG. 9 is a Western blot of 50 kDa HC fragment (50 kHC) transcytosed in polarized epithelial cell cultures. The lanes represent: (A) Pre-transcytosis control for 50 kHC. (B) 50 kHC transcytosed through T-84 cells (collected from basal chamber).

[0034] FIG. 10 is a Western blot of 50 kHC fragment transcytosed in polarized, canine kidney epithelial cell cultures. The lanes represent: (A) Pre-transcytosis control for 50 kHC. (B) 50 kHC transcytosed through MDCK cells (collected from basal chamber).

[0035] FIG. 11 is a fluorescence emission spectrum of Alexa 568˜Botulinum toxin type A transcytosis in polarized T-84 epithelial cell cultures. In the Figure: ⋄=Alexa 568˜toxin; □=Culture medium.

[0036] FIG. 12 is a fluorescence emission spectrum of Alexa 568˜Botulinum toxin type A transcytosis in polarized MDCK epithelial cell cultures. In the Figure: ⋄=Alexa 568˜toxin; □=Culture medium.

[0037] FIG. 13 is a Western blot of biotin-50 kHC transcytosed in polarized T-84 epithelial cell cultures. The lanes represent: (A) Pre-transcytosis control for biotin˜50 kHC. (B) biotin˜50 kHC transcytosed through T-84 cells (collected from basal chamber).

[0038] FIG. 14 is a Western blot of biotin˜50 kHC transcytosed in polarized MDCK epithelial cell cultures. The lanes represent: (A) Pre-transcytosis control for biotin˜50 kHC. (B) Biotin˜50 kHC transcytosed through MDCK cells (collected from basal chamber).

[0039] FIG. 15 is a fluorescence emission spectrum of GFP˜66 kHC transcytosis in polarized T-84 epithelial cell cultures. In the Figure: •=GFP˜66 kHC; ◯=Culture medium.

[0040] FIG. 16 is a fluorescence emission spectrum of GFP˜66 kHC transcytosis in polarized MDCK epithelial cell cultures. In the Figure: •=GFP˜66 kHC; ◯=Culture medium.

[0041] FIG. 17 is a Western blot of a S-Tag˜50 kHC conjugate transcytosed in T-84 polarized epithelial cell cultures. The lanes represent: (A) Pre-transcytosis control for the S-Tag˜50 kHC. (B) The S-Tag˜50 kHC transcytosed through T-84 cells (collected from basal chamber).

[0042] FIG. 18 is a Western blot of a S-Tag˜50 kHC conjugate transcytosed in MDCK polarized canine kidney epithelial cell cultures. The lanes represent: (A) Pre-transcytosis control for the S-Tag˜50 kHC. (B) The S-Tag˜50 kHC transcytosed through MDCK cells (collected from basal chamber).

[0043] FIG. 19 is a Western blot of GST˜88 kHC transcytosed in polarized T-84 epithelial cell cultures. The lanes represent: (A) Pre-transcytosis control for the GST˜88 kHC. (B) The GST˜88 kHC transcytosed through T-84 cells (collected from basal chamber).

[0044] FIG. 20 is a Western blot of GST˜88 kHC transcytosed in polarized MDCK epithelial cell cultures. The lanes represent: (A) Pre-transcytosis control for the GST˜88 kHC. (B) The GST˜88 kHC fragment fusion transcytosed through MDCK cells (collected from basal chamber).

[0045] FIG. 21 is a Western blot of GST˜66 kHC transcytosed in polarized T-84 epithelial cell cultures. The lanes represent: (A) Pre-transcytosis control for the GST˜66 kHC. (B) The GST˜66 kHC transcytosed through T-84 cells (collected from basal chamber).

[0046] FIG. 22 is a Western blot of GST˜66 kHC transcytosed in polarized MDCK epithelial cell cultures. The lanes represent: (A) Pre-transcytosis control for the GST˜66 kHC. (B) The GST˜66 kHC transcytosed through MDCK cells (collected from basal chamber).

[0047] FIG. 23 illustrates the blood level of botulinum neurotoxin serotype A after intranasal administration to mice.

[0048] FIG. 24 illustrates the blood level of serotype A HC after intranasal administration to mice.

[0049] FIG. 25 illustrates the blood level of 6×His-50 kHC after intranasal administration to mice.

[0050] FIG. 26 illustrates the blood level of GST-50 kHC after intranasal administration to mice.

[0051] FIG. 27 is a Western blot of GST˜50 kHC fragment probed with immune serum obtained from mice immunized intranasally with GST˜50 kHC.

[0052] FIG. 28 illustrates enhanced immune responses for intranasal administration of 50 kHC by co-administration with cholera toxin B subunit (CTB). In the Figure: ▪=50 kHC; ▪=50 kHC+CTB.

[0053] FIG. 29 illustrates the development of a specific antibody response to 100 kDa HC after oral immunization in mice. ELISA titers obtained seven days after the second (boost 1), third (boost 2), and fourth (boost 3) administration of 100 kDa HC are shown.

[0054] FIG. 30, which consists of FIG. 30A to 30C, is an alignment of the amino acid sequences of several seventeen kilodalton (17 kDa) hemagglutinin (“HA”) proteins associated with the botulinum toxin of various serotypes:
[0055] (1) 17 kDa HA, GENEBANK™ Accession No. CAA44260, SEQ ID NO: 20;
[0056] (2) 17 kDA HA, GENEBANK™ Accession No. BAA75081, SEQ ID NO: 21;
[0057] (3) 17 kDa HA, GENEBANK™ Accession No. P46083, SEQ ID NO: 22;
[0058] (4) 17 kDa HA, GENEBANK™ Accession No. BAA90658, SEQ ID NO: 23;
[0059] (5) 17 kDa HA, GENEBANK™ Accession No. BAB71742, SEQ ID NO: 24;
[0060] (6) 17 kDa HA, GENEBANK™ Accession No. BAA89710, SEQ ID NO: 25;
[0061] (7) 17 kDa HA, GENEBANK™ Accession No. S49104, SEQ ID NO: 26;
[0062] (8) 17 kDa HA, GENEBANK™ Accession No. AAA99056, SEQ ID NO: 27;
[0063] (9) 17 kDa HA, GENEBANK™ Accession No. CAA70496, SEQ ID NO: 28;
[0064] (10) 17 kDa HA, GENEBANK™ Accession No. AAB42188, SEQ ID NO: 29;
[0065] (11) 17 kDa HA, GENEBANK™ Accession No. CAA61226, SEQ ID NO: 30;
[0066] (12) 17 kDa HA, GENEBANK™ Accession No. B44644, SEQ ID NO: 31;
[0067] (13) 17 kDa HA, GENEBANK™ Accession No. AAB21357, SEQ ID NO: 32;
[0068] (14) 17 kDa HA, GENEBANK™ Accession No. S67990, SEQ ID NO: 33; and
[0069] (15) 17 kDa HA, GENEBANK™ Accession No. AAB21356, SEQ ID NO: 34.

[0070] FIG. 31, which consists of FIG. 31A to 31D, is an alignment of the amino acid sequences of several twenty-one kilodalton (21 kDa) hemagglutinin (“HA”) proteins associated with the botulinum toxin of various serotypes:
[0071] (1) 21 kDa HA, GENEBANK™ Accession No. CAA55717, SEQ ID NO: 35;
[0072] (2) 21 kDa HA, GENEBANK™ Accession No. S68219, SEQ ID NO: 36;
[0073] (3) 21 kDa HA, GENEBANK™ Accession No. AAB42190, SEQ ID NO: 37;
[0074] (4) 21 kDa HA, GENEBANK™ Accession No. S58864, SEQ ID NO: 38;
[0075] (5) 21 kDa HA, GENEBANK™ Accession No. AAB64349, SEQ ID NO: 39;
[0076] (6) 21 kDa HA, GENEBANK™ Accession No. S58856, SEQ ID NO: 40;
[0077] (7) 21 kDa HA, GENEBANK™ Accession No. NB_{—}783832, SEQ ID NO: 41;
[0078] (8) 21 kDa HA, GENEBANK™ Accession No. CAA07094, SEQ ID NO: 42;
[0079] (9) 21 kDa HA, GENEBANK™ Accession No. CAA61227, SEQ ID NO: 43;
[0080] (10) 21 kDa HA, GENEBANK™ Accession No. CAA73969, SEQ ID NO: 44;
[0081] (11) 21 kDa HA, GENEBANK™ Accession No. CAA65350, SEQ ID NO: 45;
[0082] (12) 21 kDa HA, GENEBANK™ Accession No. CAA65347, SEQ ID NO: 46;
[0083] (13) 21 kDa HA, GENEBANK™ Accession No. CAA65345, SEQ ID NO: 47;
[0084] (14) 21 kDa HA, GENEBANK™ Accession No. BAA90656, SEQ ID NO: 48;
[0085] (15) 21 kDa HA, GENEBANK™ Accession No. BAA89708, SEQ ID NO: 49;
[0086] (16) 21 kDa HA, GENEBANK™ Accession No. S46426, SEQ ID NO: 50;
[0087] (17) 21 kDa HA, GENEBANK™ Accession No. CAA65346, SEQ ID NO: 51;
[0088] (18) 21 kDa HA, GENEBANK™ Accession No. BAA75074, SEQ ID NO: 52;
[0089] (19) 21 kDa HA, GENEBANK™ Accession No. BAB71744, SEQ ID NO: 53;
[0090] (20) 21 kDa HA, GENEBANK™ Accession No. CAC19890, SEQ ID NO: 54;
[0091] (21) 21 kDa HA, GENEBANK™ Accession No. NP_{—}781286, SEQ ID NO: 55;
[0092] (22) 21 kDa HA, GENEBANK™ Accession No. JC5340, SEQ ID NO: 56; and
[0093] (23) 21 kDa HA, GENEBANK™ Accession No. AAK17956, SEQ ID NO: 57.

[0094] FIG. 32, which consists of FIG. 32A to 32F, is an alignment of the amino acid sequences of several thirty-five kilodalton (35 kDa) hemagglutinin (“HA”) proteins associated with the botulinum toxin of various serotypes:
[0095] (1) 35 kDa HA, GENEBANK™ Accession No. AAA99055, SEQ ID NO: 58;
[0096] (2) 35 kDa HA, GENEBANK™ Accession No. S58865, SEQ ID NO: 59;
[0097] (3) 35 kDa HA, GENEBANK™ Accession No. CAA73965, SEQ ID NO: 60;
[0098] (4) 35 kDa HA, GENEBANK™ Accession No. H44644, SEQ ID NO: 61;
[0099] (5) 35 kDa HA, GENEBANK™ Accession No. S58857, SEQ ID NO: 62;
[0100] (6) 35 kDa HA, GENEBANK™ Accession No. AAB42189, SEQ ID NO: 63;
[0101] (7) 35 kDa HA, GENEBANK™ Accession No. CAA74632, SEQ ID NO: 64;
[0102] (8) 35 kDa HA, GENEBANK™ Accession No. BAB71747, SEQ ID NO: 65;
[0103] (9) 35 kDa HA, GENEBANK™ Accession No. BAA75077, SEQ ID NO: 66;
[0104] (10) 35 kDa HA, GENEBANK™ Accession No. S46429, SEQ ID NO: 67;
[0105] (11) 35 kDa HA, GENEBANK™ Accession No. P46084, SEQ ID NO: 68;
[0106] (12) 35 kDa HA, GENEBANK™ Accession No. BAA90659, SEQ ID NO: 69;
[0107] (13) 35 kDa HA, GENEBANK™ Accession No. BAA89711, SEQ ID NO: 70; and
[0108] (14) 35 kDa HA, GENEBANK™ Accession No. CAA61226, SEQ ID NO: 71.

[0109] FIG. 33, which consists of FIG. 33A to 33J, is an alignment of the amino acid sequences of several seventy kilodalton (70 kDa) hemagglutinin (“HA”) proteins associated with the botulinum toxin of various serotypes:
[0110] (1) 70 kDa HA, GENEBANK™ Accession No. BAA89709, SEQ ID NO: 72;
[0111] (2) 70 kDa HA, GENEBANK™ Accession No. BAA90657, SEQ ID NO: 73;
[0112] (3) 70 kDa HA, GENEBANK™ Accession No. AAB42187, SEQ ID NO: 74;
[0113] (4) 70 kDa HA, GENEBANK™ Accession No. AAM75949, SEQ ID NO: 75;
[0114] (5) 70 kDa HA, GENEBANK™ Accession No. CAA70495, SEQ ID NO: 76;
[0115] (6) 70 kDa HA, GENEBANK™ Accession No. CAA73963, SEQ ID NO: 77;
[0116] (7) 70 kDa HA, GENEBANK™ Accession No. CAA61225, SEQ ID NO: 78;
[0117] (8) 70 kDa HA, GENEBANK™ Accession No. CAA75931, SEQ ID NO: 79;
[0118] (9) 70 kDa HA, GENEBANK™ Accession No. QLCLBF, SEQ ID NO: 80;
[0119] (10) 70 kDa HA, GENEBANK™ Accession No. AAA72120, SEQ ID NO: 81;
[0120] (11) 70 kDa HA, GENEBANK™ Accession No. CAA04327, SEQ ID NO: 82;
[0121] (12) 70 kDa HA, GENEBANK™ Accession No. CAA57443, SEQ ID NO: 83;
[0122] (13) 70 kDa HA, GENEBANK™ Accession No. AAA99057, SEQ ID NO: 84;
[0123] (14) 70 kDa HA, GENEBANK™ Accession No. P01558, SEQ ID NO: 85;
[0124] (15) 70 kDa HA, GENEBANK™ Accession No. BAA07575, SEQ ID NO: 170;
[0125] (16) 70 kDa HA, GENEBANK™ Accession No. P46085, SEQ ID NO: 171; and
[0126] (17) 70 kDa HA, GENEBANK™ Accession No. BAA75075, SEQ ID NO: 188.

[0127] FIG. 34, which consists of FIGS. 34A to 34AA, is an alignment of the amino acid sequences of several nontoxin, non-hemagglutinin protein (“NTNH”) proteins associated with the botulinum toxin of various serotypes:
[0128] (1) NTNH, GENEBANK™ Accession No. CAA55073, SEQ ID NO: 86;
[0129] (2) NTNH, GENEBANK™ Accession No. CAA73967, SEQ ID NO: 87;
[0130] (3) NTNH, GENEBANK™ Accession No. CAA55074, SEQ ID NO: 88;
[0131] (4) NTNH, GENEBANK™ Accession No. AAB64350, SEQ ID NO: 89;
[0132] (5) NTNH, GENEBANK™ Accession No. CAA61125, SEQ ID NO: 90;
[0133] (6) NTNH, GENEBANK™ Accession No. CAA74634, SEQ ID NO: 91;
[0134] (7) NTNH, GENEBANK™ Accession No. S68218, SEQ ID NO: 92;
[0135] (8) NTNH, GENEBANK™ Accession No. CAA63550, SEQ ID NO: 93;
[0136] (9) NTNH, GENEBANK™ Accession No. AAB42191, SEQ ID NO: 94;
[0137] (10) NTNH, GENEBANK™ Accession No. CAA61228, SEQ ID NO: 95;
[0138] (11) NTNH, GENEBANK™ Accession No. BAA90660, SEQ ID NO: 96;
[0139] (12) NTNH, GENEBANK™ Accession No. BAA89712, SEQ ID NO: 97;
[0140] (13) NTNH, GENEBANK™ Accession No. BAB71748, SEQ ID NO: 98;
[0141] (14) NTNH, GENEBANK™ Accession No. BAA75083, SEQ ID NO: 99;
[0142] (15) NTNH, GENEBANK™ Accession No. S46430, SEQ ID NO: 100;
[0143] (16) NTNH, GENEBANK™ Accession No. AAB36016, SEQ ID NO: 101;
[0144] (17) NTNH, GENEBANK™ Accession No. P46081, SEQ ID NO: 102;
[0145] (18) NTNH, GENEBANK™ Accession No. JC4901, SEQ ID NO: 103;
[0146] (19) NTNH, GENEBANK™ Accession No. BAA12299, SEQ ID NO: 104;
[0147] (20) NTNH, GENEBANK™ Accession No. CAA74630, SEQ ID NO: 105;
[0148] (21) NTNH, GENEBANK™ Accession No. CAA61123, SEQ ID NO: 106;
[0149] (22) NTNH, GENEBANK™ Accession No. CAA67511, SEQ ID NO: 107;
[0150] (23) NTNH, GENEBANK™ Accession No. CAA61233, SEQ ID NO: 108;
[0151] (24) NTNH, GENEBANK™ Accession No. AAC60474, SEQ ID NO: 109;
[0152] (25) NTNH, GENEBANK™ Accession No. I40644, SEQ ID NO: 110;
[0153] (26) NTNH, GENEBANK™ Accession No. CAA73971, SEQ ID NO: 111;
[0154] (27) NTNH, GENEBANK™ Accession No. CAA72807, SEQ ID NO: 112;
[0155] (28) NTNH, GENEBANK™ Accession No. P46082, SEQ ID NO: 113;
[0156] (29) NTNH, GENEBANK™ Accession No. A47708, SEQ ID NO: 114;
[0157] (30) NTNH, GENEBANK™ Accession No. Q06366, SEQ ID NO: 115;
[0158] (31) NTNH, GENEBANK™ Accession No. AAM75953, SEQ ID NO: 116;
[0159] (32) NTNH, GENEBANK™ Accession No. I40631, SEQ ID NO: 117;
[0160] (33) NTNH, GENEBANK™ Accession No. P10844, SEQ ID NO: 118;
[0161] (34) NTNH, GENEBANK™ Accession No. 1EPWA, SEQ ID NO: 119;
[0162] (35) NTNH, GENEBANK™ Accession No. BAA75078, SEQ ID NO: 120;
[0163] (36) NTNH, GENEBANK™ Accession No. AAL11498, SEQ ID NO: 121;
[0164] (37) NTNH, GENEBANK™ Accession No. AAK97132, SEQ ID NO: 122;
[0165] (38) NTNH, GENEBANK™ Accession No. CAA73968, SEQ ID NO: 123;
[0166] (39) NTNH, GENEBANK™ Accession No. P30995, SEQ ID NO: 124;
[0167] (40) NTNH, GENEBANK™ Accession No. BAC05434, SEQ ID NO: 125;
[0168] (41) NTNH, GENEBANK™ Accession No. BAB12249, SEQ ID NO: 126;
[0169] (42) NTNH, GENEBANK™ Accession No. BAB03512, SEQ ID NO: 127;
[0170] (43) NTNH, GENEBANK™ Accession No. S21178, SEQ ID NO: 128;
[0171] (44) NTNH, GENEBANK™ Accession No. Q00496, SEQ ID NO: 129;
[0172] (45) NTNH, GENEBANK™ Accession No. Q45894, SEQ ID NO: 130;
[0173] (46) NTNH, GENEBANK™ Accession No. CAA65352, SEQ ID NO: 131;
[0174] (47) NTNH, GENEBANK™ Accession No. CAA65348, SEQ ID NO: 132;
[0175] (48) NTNH, GENEBANK™ Accession No. AAB22656, SEQ ID NO: 133;
[0176] (49) NTNH, GENEBANK™ Accession No. CAA71744, SEQ ID NO: 134;
[0177] (50) NTNH, GENEBANK™ Accession No. A49777, SEQ ID NO: 135;
[0178] (51) NTNH, GENEBANK™ Accession No. P18640, SEQ ID NO: 136;
[0179] (52) NTNH, GENEBANK™ Accession No. 1F83A, SEQ ID NO: 137;
[0180] (53) NTNH, GENEBANK™ Accession No. IF82A, SEQ ID NO: 138;
[0181] (54) NTNH, GENEBANK™ Accession No. BAA89713, SEQ ID NO: 139;
[0182] (55) NTNH, GENEBANK™ Accession No. BAA08418, SEQ ID NO: 140;
[0183] (56) NTNH, GENEBANK™ Accession No. A49928, SEQ ID NO: 141;
[0184] (57) NTNH, GENEBANK™ Accession No. BAC22064, SEQ ID NO: 142;
[0185] (58) NTNH, GENEBANK™ Accession No. 1906297A, SEQ ID NO: 143;
[0186] (59) NTNH, GENEBANK™ Accession No. AAC37720, SEQ ID NO: 144;
[0187] (60) NTNH, GENEBANK™ Accession No. NP_{—}783831, SEQ ID NO: 145;
[0188] (61) NTNH, GENEBANK™ Accession No. S39791, SEQ ID NO: 146;
[0189] (62) NTNH, GENEBANK™ Accession No. 1906297B, SEQ ID NO: 147;
[0190] (63) NTNH, GENEBANK™ Accession No. CAA37321, SEQ ID NO: 148;
[0191] (64) NTNH, GENEBANK™ Accession No. AAK72964, SEQ ID NO: 149;
[0192] (65) NTNH, GENEBANK™ Accession No. Q60393, SEQ ID NO: 150;
[0193] (66) NTNH, GENEBANK™ Accession No. AAO21363, SEQ ID NO: 151;
[0194] (67) NTNH, GENEBANK™ Accession No. AAA23210, SEQ ID NO: 152;
[0195] (68) NTNH, GENEBANK™ Accession No. CAA61124, SEQ ID NO: 153;
[0196] (69) NTNH, GENEBANK™ Accession No. AAL66183, SEQ ID NO: 154;
[0197] (70) NTNH, GENEBANK™ Accession No. 1717342A, SEQ ID NO: 155;
[0198] (71) NTNH, GENEBANK™ Accession No. S33411, SEQ ID NO: 156;
[0199] (72) NTNH, GENEBANK™ Accession No. 3BTAA, SEQ ID NO: 157;
[0200] (73) NTNH, GENEBANK™ Accession No. CAA36289, SEQ ID NO: 158;
[0201] (74) NTNH, GENEBANK™ Accession No. P10845, SEQ ID NO: 159;
[0202] (75) NTNH, GENEBANK™ Accession No. BTCLAB, SEQ ID NO: 160;
[0203] (76) NTNH, GENEBANK™ Accession No. AAD09563, SEQ ID NO: 161;
[0204] (77) NTNH, GENEBANK™ Accession No. CAA73972, SEQ ID NO: 162;
[0205] (78) NTNH, GENEBANK™ Accession No. CAA77991, SEQ ID NO: 163;
[0206] (79) NTNH, GENEBANK™ Accession No. AAB24244, SEQ ID NO: 164;
[0207] (80) NTNH, GENEBANK™ Accession No. BAA90661, SEQ ID NO: 165;
[0208] (81) NTNH, GENEBANK™ Accession No. S70582, SEQ ID NO: 166; and
[0209] (82) NTNH, GENEBANK™ Accession No. BAA75084, SEQ ID NO: 167; and
[0210] (83) NTNH, GENEBANK™ Accession No. P19321, SEQ ID NO: 168.
[0211] (84) NTNH, GENEBANK™ Accession No. S48110, SEQ ID NO: 173;
[0212] (85) NTNH, GENEBANK™ Accession No. S48109, SEQ ID NO: 174;
[0213] (86) NTNH, GENEBANK™ Accession No. CAA50145, SEQ ID NO: 175;
[0214] (87) NTNH, GENEBANK™ Accession No. CAA50150, SEQ ID NO: 176;
[0215] (88) NTNH, GENEBANK™ Accession No. AAA23282, SEQ ID NO: 177;
[0216] (89) NTNH, GENEBANK™ Accession No. AAGO1403, SEQ ID NO: 178;
[0217] (90) NTNH, GENEBANK™ Accession No. AAA80610, SEQ ID NO: 179;
[0218] (91) NTNH, GENEBANK™ Accession No. 1DIWA, SEQ ID NO: 180;
[0219] (92) NTNH, GENEBANK™ Accession No. 1FV2A, SEQ ID NO: 181;
[0220] (93) NTNH, GENEBANK™ Accession No. 1 D0HA, SEQ ID NO: 182;
[0221] (94) NTNH, GENEBANK™ Accession No. 1DLLA, SEQ ID NO: 183;
[0222] (95) NTNH, GENEBANK™ Accession No. 1AF9, SEQ ID NO: 184;
[0223] (96) NTNH, GENEBANK™ Accession No. 1DFQA, SEQ ID NO: 185;
[0224] (97) NTNH, GENEBANK™ Accession No. AAF73267, SEQ ID NO: 186;
[0225] (98) NTNH, GENEBANK™ Accession No. AAA230209, SEQ ID NO: 187; and
[0226] (99) NTNH, GENEBANK™ Accession No. CAB43706. SEQ ID NO: 188.

### DETAILED DESCRIPTION OF THE INVENTION

[0227] Translocation of BoNTs (the holotoxin) across epithelial membranes is believed to occur by binding of the BoNT to the membrane of an epithelial cell, invagination of the cell's membrane resulting in enclosure of the BoNT within a vesicle of the cell, translocation of the vesicle from one side of the cell to the other (e.g., from the apical face of the cell to its basolateral face, or vice versa), re-integration of the vesicle with the cell's membrane and release of the BoNT from the cell. It has been discovered that some carboxyterminal fragments of HCs share with naturally-occurring BoNTs the ability to translocate (i.e., transcytose) across epithelial membranes without entering the cytosol of epithelial cells. In particular, the inventors have discovered that HC carboxyterminal fragments as small as about 2 kilodaltons retain epithelial transcytotic capacity and can be used to ferry entities as large as 1000 daltons or greater across epithelial membranes.

[0228] The nature of the entity linked to the carboxyterminal HC fragment does not significantly affect the fragment's transcytotic capacity. Substantially any type of entity can be transported in this manner, limited only by the size capacity of the epithelial vesicles and by one's ability to link the entity to the HC fragment.

[0229] The invention includes a composition for translocating an entity across an animal's non-keratinized epithelium. The composition comprises an entity linked to a carboxyterminal HC fragment. It is preferred that the size of the entity is not greater than the lumenal capacity of vesicles of cells of the epithelium. The epithelium should be a non-keratinized epithelium, and is preferably not kidney epithelium. The fragment-linked entity(ies) can be suspended or mixed with a variety of other ingredients, such as pharmaceutically acceptable vehicles, the protective auxiliary proteins HA and/or NTNH which ordinarily accompany the active botulinum neurotoxin, fillers and/or other components commonly used in pharmaceutical preparations.

[0230] As used herein, the terms “carboxyterminal fragment of the HC of Clostridium botulinum neurotoxin” or “carboxyterminal HC fragment” means a fragment of the amino acid sequence of a full length HC of BoNT of any serotype (e.g., the heavy chain of SEQ ID NOs: 1-7), the fragment including at least a portion of the sequence that makes up that half of the full length HC amino acid sequence that includes that carboxy terminus. Accordingly, it is contemplated that the carboxyterminal fragment for use in the invention is shorter than the full length HC. The fragment may exclude, for example, at least one amino acid residue of the full length HC, and preferably excludes 50, 100, 150, 200, 250, 300, 350, or 400 or more residues of the full length HC. Preferably, many of the excluded residues are those that occur in that half of the full length sequence that includes the amino terminus of the full length HC. Nonetheless, embodiments of the fragment are contemplated in which 5, 10, 15, 25, 50, or more amino acid residues are also omitted from that half of the full length HC that include the carboxy terminus.

[0231] In an embodiment of the invention, the carboxyterminal HC fragment of the invention includes about sixty residues of the HC of the Clostridium botulinum neurotoxin, with a preferred fragment including about thirty-five residues HC of the Clostridium botulinum neurotoxin and a more preferred fragment including twenty to about fifty amino acid residues of the HC of the Clostridium botulinum neurotoxin.

[0232] Alternatively, it may be preferred that the carboxyterminal HC fragment is a polypeptide that has an amino acid sequence that is at least 2% (by molecular mass) of the amino acid sequence of the full length HC of BoNT, with the fragment being obtained by excising/omitting the undesired portion of the full length HC beginning at the amino terminus (i.e., beginning at residue 468 in serotype A of FIG. 1). More preferably, the carboxyterminal HC fragment is a polypeptide that has the amino acid sequence of a portion that comprises at least about 5%, at least about 30%, at least about 50%, at least about 60%, at least about 70%, at least about 80%, and at least about 90% (by molecular mass) of the amino acid sequence of the full length HC of BoNT.

[0233] For example, the carboxyterminal HC fragments, serotype A, herein designated “88 kHC” (eighty-eight kilodalton carboxy fragment of BoNT HC), “66 kHC” (sixty-six kilodalton carboxy fragment of BoNT HC), and “50 kHC” (fifty kilodalton carboxy fragment of BoNT HC) are carboxyterminal HC fragments that are polypeptides that have an amino acid sequence of at least about 80%, at least about 70%, and at least about 50% of a portion of the full length BoNT HC sequence, respectively.

[0234] The carboxyterminal HC fragment for use in the invention can be derived from the HC of any of the known BoNT serotypes (e.g., any of A, B, C, D, E, F, and G) or from any subsequently discovered BoNT serotype. Preferably, the carboxyterminal HC fragment will be derived from a serotype that is known to be pathogenic in animals of the same species as the animal to which the composition is to be administered (e.g., serotypes A, B, and E for humans). However, it is not necessary that the selected fragment be obtained from a serotype that ordinarily exhibits pathogenicity in a given animal in order to retain transcytotic capacity in that animal.

[0235] The suitability for use in the invention of a carboxyterminal fragment HC obtained from a specific serotype or of a fragment having a specific amino acid sequence can be empirically assessed using routine scientific protocols, for example using a model system in which the fragment is contacted with cells of the same type and species to which administration is contemplated and transepithelial transport is observed and evaluated.

[0236] It is recognized that not all fragments will exhibit maximally efficient transcytosis in every epithelial cell type in every species. For example, the experiments described in the examples of this disclosure demonstrate that BoNTs, HCs, and/or fragments of serotypes A and B, do not appear to cross canine kidney epithelial membranes of a certain cell type (MDCK) with high efficiency. The fact that there may be specific embodiments of the invention that are not characterized by highly significant transcytotic abilities across certain epithelial cell types in certain species does not detract from the efficacy of the compositions and methods described herein.

[0237] It is preferred that the carboxyterminal HC fragment used in the methods and compositions of this invention possess at least the portion of the HC that is responsible for the toxin's ability to bind cell membranes. For example, the fragment may comprise the β-trefoil domain and/or the associated lectin binding domain. Alternatively, the carboxyterminal HC fragment may comprise a peptidomimetic of the HC that possesses the same binding properties as the native HC, as empirically determined by routine binding assays.

[0238] The identity or nature of the entity that is linked to the carboxyterminal HC fragment may be any entity that one desires to translocate across an epithelial surface. The entity or entities that is/are linked to the carboxyterminal HC fragment may be of virtually any size, as long as the size of the entity is not greater than the luminal capacity of vesicles of the cells to which the composition is to be administered. It is preferred that the selected entity or entities that is/are linked to the BoNT HC fragment has a molecular mass of about a few hundred daltons (about 100 daltons to about 200 daltons) to about a few tens of thousands of daltons (about 10,000 daltons to about 40,000 daltons). More preferred are entities that have molecular mass that is no greater than about 1000 daltons, and most preferred are entities of molecular mass of about 300 daltons to about 550 daltons. Alternatively, the molecular mass of the entity may be hundreds of thousands, millions, or tens of millions of daltons or more. Thus, transepithelial transport of very large supra-molecular complexes (e.g., a liposome or a virus vector) is contemplated.

[0239] Suitable entities that can be linked to the carboxyterminal HC fragments of the invention may include particles of organic or inorganic materials (for example, ceramic particles), small organic or inorganic chemical compounds (tetrafluoroethylene polymers, chitosans), polypeptides (including, for example, single- and multi-subunit proteins such as enzymes, antibodies, and polypeptide epitopes of a pathogen), nucleic acids, and nucleic acid vectors (e.g., virus vectors containing an expressible nucleic acid).

[0240] In an embodiment, the entity comprises an immunogenic epitope of a pathogen of the animal. The composition having the immunogenic epitope linked to a carboxyterminal HC fragment facilitates delivery of the epitope to the bloodstream of the animal, thereby inducing generation of an immune response against the epitope. The immunogenic epitope may be protein or non-protein. The immune response provoked can thereafter inhibit or prevent pathology caused by the pathogen in the animal. Non-protein antigens from which suitable epitopes may be obtained include carbohydrates and nucleic acids.

[0241] Thus, in an embodiment, the compositions described herein are useful as vaccines for inducing protective immunity in vertebrates, such as mammals, reptiles or fish, when the entity to which the carboxyterminal HC fragment is linked is immunogenic. The compositions and methods described herein can be used for vaccination against substantially any human or other vertebrate pathogen (viral, bacterial, prion), including pathogens that may be weaponized and used as agents of biological warfare, as are known or to be developed in the art.

[0242] For example, the pathogen against which the vaccine compositions of the invention may be formulated can be Plasmodium falciparum (the causative agent of malaria), Bordetella pertussis (the causative agent of whooping cough), measles viruses, mumps viruses, rubella viruses, influenza viruses, hepatitis viruses, Pneumococcal viruses, varicella viruses, rabies viruses, and the human immunodeficiency virus. Additionally, the immunogenic epitope for use as an entity can be selected to provoke an immune response against, for example, the pathogens Bacillus anthracis (causative agent of anthrax), Pseudomonas pseudomallei, Clostridium botulinum toxin (causative agent of botulism), Yersinia pestis (causative agent of the plague), Vibriocholera, Variola major (causative agent of smallpox), Francisella tularensis (causative agent of tularemia), virus(es) that are the causative agents of viral hemorrhagic fevers (e.g., Crimean-Cong hemorragic fever virus), Corynebacterium diptheriae, Coxiella burnetti (causative agent of Q fever), organisms of the genus Brucella (e.g., Brucella abortus, Brucella suis, Brucella melitensis, Brucella canis) (causative agent(s) of brucellosis), saxitoxin, Burkholderia mallei (causative agent of glanders), the ricin toxin of Ricinus communis, the epsilon toxin of Clostridium perfringens, Clostridiom tetani, Staphylococcus enterotoxin B, Nipah virus, Hantavirus, Rift Valley fever virus, virus(es) that are the causative agents of tick-borne encephalitis, Staphylococcal enterotoxin B, trichothecene mycotoxins, the causative agent of Yellow fever, the causative agents of multi-drug resistant tuberculosis, and the coronavirus that is the causative agent of Severe Acute Respiratory Syndrome (SARS). The immunogenic epitope that is the entity may also be an epitope that provokes immunity against insect or reptile venom and against various parasites.

[0243] The entity or entities may comprise a molecule that is able to bind specifically with another molecule in the bloodstream of the animal to which the composition is to be administered. Such entities include, but are not limited to, antibody substances such as tetra-subunit immunoglobulins and single-chain antibodies and individual members or fragments of receptor-ligand binding pairs (e.g., tumor necrosis factor alpha and its cell-surface receptor). An “antibody substance” means an immunoglobulin molecule or an immunologically active portion of an immunoglobulin molecule, i.e., a molecule that contains an antigen binding site which specifically binds an antigen. A molecule that specifically binds with an antigen is a molecule that binds the antigen but does not substantially bind other molecules. Examples of immunologically active portions of immunoglobulin molecules include the F(ab) and the F(ab′)₂ fragments which can be generated by treating the antibody with an enzyme such as papain or pepsin, respectively. The term also includes polyclonal and monoclonal antibodies. The term “monoclonal antibody” or “monoclonal antibody composition” refers to a population of antibody molecules that contain only one species of an antigen binding site capable of immunoreacting with a particular epitope.

[0244] In yet another important embodiment, the entity is an agent that exhibits a catalytic or biological activity in vivo. Examples of such agents include cytotoxins, such as ricin; enzymes, such as proteases (e.g., tissue-type plasminogen activators or urokinase-type plasminogen activators); and enzyme inhibitors. The entity can also be a detectable label, such as a contrast agent, a radio-labeled antibody substance, or a radioisotope, such as ³H, ³⁵S, ¹²³I, and/or ¹³¹I.

[0245] It may be desirable that the linked entity is a larger entity that encompasses or incorporates numerous smaller therapeutic or immunogenic agents. For example, entities which may be used to transport numerous smaller therapeutic, diagnostic or immunogenic agents include liposomes, resealed RBCs, micelles, microspheres, and microparticles.

[0246] In the composition of the invention, the selected entity (or entities) is linked to the selected carboxyterminal HC fragment. A single fragment can be linked to one or more entities that are the same or are different. Alternatively, a single entity can be linked with multiple fragments (each of which may be the same or different).

[0247] The entity may be linked to the carboxyterminal HC fragment at any location, as long as the transcytotic capability of the fragment is not significantly impaired. For example, the entity may be linked to or near carboxy terminus of the fragment. It is preferred that the entity is linked at or near the amino terminus end of the fragment.

[0248] The nature of the linker may vary. The precise chemistry, linker, or method used to link the entity and the BoNT HC fragment is not critical. The linkage must merely be sufficiently strong or resilient that the fragment does not dissociate from the entity upon vesicular encapsulation of the fragment by the epithelial cell. The entity and the fragment may be linked by a covalent bond, such as, for example, a peptide bond. However, strong non-covalent linkage can also be used.

[0249] The linker may also be an intervening molecule, which may or may not have a chemical, therapeutic, or diagnostic function as well as its linking function. Examples of intervening molecules that can be used as linkers include biotin, avidin, or an antibody substance. Linkers of this type may be interposed between the entity and the fragment.

[0250] In the case where the selected entity or entities is a peptide or polypeptide, the entity can be linked to the selected fragment by peptide bond(s), thereby forming a unitary polypeptide comprising the entity and the fragment. For example, a unitary polypeptide can be prepared that comprises both the carboxyterminal HC fragment and the selected entity. Such polypeptides can be prepared in any manner known or to be developed in the art, such as by expression of a fusion polypeptide from a recombinant expression vector, or by chemical synthesis, such as, for example, the solid-phase method.

[0251] The entity may also be linked by incorporation of the fragment into the entity itself. For example, if the entity is a liposome, the fragment may include a specific domain that permits a portion of the fragment to penetrate and be maintained within the structure of the liposome, while the transcytotic portion of the fragment remains unimpaired.

[0252] Depending on the desired use/route of administration intended for the final composition, methods can also be used to link the entity and the fragment in a chemically or biologically unstable or reversible manner. For example, the linkage may be enzyme cleavable by an enzyme co-administered to the patient or that is known to be present in the anatomical area to which the composition is delivered. Alternatively, one or more disulfide bonds may be used.

[0253] The entity and the fragment can be made separately and thereafter linked, or they can be made simultaneously.

[0254] In an embodiment, the composition of the invention may be a vaccine against the Clostridium botulinum toxin, in which the entity and the carboxyterminal HC fragment exist as an integral polypeptide molecule, and the linker is therefore a peptide bond. In this embodiment of the invention, the carboxyterminal HC fragment/entity integral polypeptide molecule comprises at least that portion of the sequence of the full length BoNT that encodes an immunogenic epitope that provokes an immune response in the animal for which the vaccine is intended.

[0255] Regardless of the epitope or the specific type of entity utilized, the immune response elicited may be a systemic immune response or a mucosal immune response. Depending on the circumstances in which the compositions and methods of the invention are to be applied, it may be desirable to elicit a mucosal immune response, rather than a systemic response, especially when the antigen against which immunity can be produced can be utilized in both a beneficial and a detrimental/toxic manner.

[0256] As an example, it is known that botulinum toxin is a potent toxin that is used as an agent of warfare or bioterrorism. Thus, immunization using the compositions and methods of the invention against botulinum toxin may be desirable. However, botulinum toxin is commonly used as a therapeutic agent to treat disorders that are characterized by an excessive and involuntary release of acetylcholine. Thus, an individual having a systemic immunity to botulinum toxin would be subsequently substantially foreclosed from receiving the benefits of botulinum toxin therapy.

[0257] Compositions of the invention that are vaccines that evoke substantially only mucosal immunity, thereby avoiding this problem, may be prepared by use of a composition that contains the vaccine of the invention and an adjuvant that selectively triggers substantially only mucosal immunity. Such adjuvants include, for example, cholera toxin B subunit or unmethylated oligonucleotides. The adjuvants can be associated with or linked to the fragment-linked antigen or the fragment itself, or the adjuvant(s) can be co-administered to the animal.

[0258] In another embodiment, the vaccine of the invention can be prepared so as to elicit substantially only mucosal immunity in the animal to which it is administered by including signaling molecules that promote mucosal immune response and/or inhibit systemic immune response in the composition of the invention. Such signaling molecules may include interleukins or transforming growth factors. The signaling molecules may be linked or otherwise associated with the fragment-linked antigen, the fragment itself, or may be co-administered to the animal with the compositions of the invention.

[0259] By use of the compositions and methods described herein, transepithelial transport of the composition of the invention can be accomplished, in most cases, unidirectionally—i.e., from the apical surface of the epithelium to the basolateral surface, or, alternatively from the basolateral surface to the apical surface. The selected epithelium may be any known, although the efficiency of transcytosis may vary depending on the species of vertebrate, the specific epithelium selected, and/or other chemical or physiological factors. For example, it has been demonstrated that, in certain canine kidney epithelial cell cultures, transport using carboxyterminal fragments of HC, serotypes A and B, is less efficient; thus, kidney epithelium is not preferred.

[0260] The epithelium to be crossed by the entity-linked carboxyterminal HC fragment is preferably non-keratinized, or has been rendered non-keratinized. Most epithelia other than skin are normally non-keratinized. However, de-keratinization or partial solubilization of skin tissue can enable transdermal use of the compositions and methods described herein. Examples of generally suitable epithelia include gastrointestinal (e.g., oral, esophageal, gastric, ileal, duodenal, jejunal, colon, and anal), nasal, pulmonary, vaginal, and ocular epithelia. Epithelia accessed by peritoneal administration of the compositions described herein can also be suitable.

[0261] A wide variety of animals are susceptible to infection or colonization by Clostridium botulinum. It is preferred that the compositions and methods of the invention are applied to these animals. Accordingly, the compositions described herein are preferably for use in substantially all vertebrates, and to induce physiological responses in non-vertebrate animals, such as insects.

[0262] One species of animals for which the compositions and methods described herein are intended is humans. For humans, use of carboxyterminal HC fragments derived from full length HCs of the A, B, and E serotypes are preferred. Additionally, many fragments from all the BoNT serotypes will be useful in common animals, such as house pets and farm animals. Thus, veterinary uses analogous to the pharmaceutical uses described herein are contemplated.

[0263] As will be recognized by a person of skill, the ability of a fragment to transcytose across an epithelium of a specific animal will vary depending on various factors, including the primary sequence of the fragment, the type/nature of the entity linked thereto, the serotype of BoNT from which the fragment was derived, etc. For example, fragments derived from serotype C may not comprise a most efficient transepithelial delivery in humans, but can be used to facilitate relatively effective and efficient delivery in non-human animals.

[0264] This differential capability among species facilitates use of the compositions of the invention for pesticidal and insecticidal purposes (i.e., by linking a fragment that does not transcytose across human epithelia with an entity that is a toxic agent). Suitable pesticidal or insecticidal agents may be those that exhibit greater toxicity toward pests or vermin than they do toward humans, and can be used to make pesticidal or insecticidal agents safer than many of those presently available. Such agents can be particularly useful in environments in which unavoidable exposure to humans is anticipated (e.g., in environments including children or food preparation facilities).

[0265] The invention also includes a foodstuff, wherein the genome of an ingredient of the foodstuff has been engineered to include a polynucleotide expressibly encoding a chimeric protein comprising an immunogenic or a therapeutic polypeptide linked to a carboxyterminal HC fragment. If desired, the chimeric protein may also be engineered to include one or more of the auxiliary proteins (HA(s) or NTNHs; SEQ ID NOs: 20 to 168, and 170 to 188), or other proteins or polypeptides.

[0266] Examples of ingredients which may be genetically modified accordingly include banana, potatoes, spinach, soybeans, and tomatoes. The ingredient can be administered individually to a human (e.g., by ingestion of an uncooked recombinant banana, tomato, or potato), or the ingredient can be incorporated into a prepared food comprising the ingredient (e.g., a fruit salad comprising pieces of recombinant banana).

[0267] The invention encompasses the preparation and use of medicaments and pharmaceutical or veterinary compositions comprising a carboxyterminal HC fragment having an entity linked thereto as an active ingredient. Such a pharmaceutical composition may consist of the linked active ingredient alone, in a form suitable for administration to a subject, or the pharmaceutical composition may comprise the linked active ingredient and one or more pharmaceutically acceptable vehicles, one or more additional ingredients, or some combination of these. Administration of one of these pharmaceutical compositions to a subject is useful for treating, ameliorating, relieving, inducing an immune response against, preventing, inhibiting, or reducing any of a variety of disorders in the subject, as described elsewhere in the present disclosure. The active ingredient may be present in the pharmaceutical composition in the form of a physiologically acceptable ester or salt, such as in combination with a physiologically acceptable cation or anion, as is well known in the art.

[0268] As used herein, the term “pharmaceutically acceptable vehicle” means a chemical composition with which the active ingredient may be combined and which, following the combination, can be used to administer the active ingredient to a subject.

[0269] As used herein, the term “physiologically acceptable” ester or salt means an ester or salt form of the active ingredient which is compatible with any other ingredients of the pharmaceutical composition and which is not deleterious to the subject to which the composition is to be administered.

[0270] The formulations of the pharmaceutical compositions described herein may be prepared by any method known or hereafter developed in the art of pharmacology. In general, such preparatory methods include the step of bringing the active ingredient into association with a vehicle or one or more other accessory ingredients, and then, if necessary or desirable, shaping or packaging the product into a desired single- or multi-dose unit.

[0271] Although the descriptions of pharmaceutical compositions provided are principally directed to pharmaceutical compositions which are suitable for ethical administration to humans, it will be understood by the skilled artisan that such compositions are generally suitable for administration to animals of all sorts. Modification of pharmaceutical compositions suitable for administration to humans in order to render the compositions suitable for administration to various animals is well understood, and the ordinarily skilled veterinary pharmacologist can design and perform such modification with merely ordinary, if any, experimentation. Subjects to which administration of the pharmaceutical compositions of the invention is contemplated include, but are not limited to, humans and other primates, mammals, including commercially relevant mammals; such as cattle, pigs, horses, sheep, cats, and dogs; birds, including commercially relevant birds such as chickens, ducks, quail, geese, and turkeys; fish including farm-raised fish and aquarium fish; and crustaceans such as farm-raised shellfish and mollusks.

[0272] Pharmaceutical compositions that are useful in the methods of the invention may be prepared, packaged, or sold in formulations suitable for gastrointestinal, oral, rectal, vaginal, parenteral, topical, pulmonary, intranasal, buccal, ophthalmic, or another route of administration. Other contemplated formulations include projected nanoparticles, liposomal preparations, resealed erythrocytes containing the active ingredient, and immunologically-based formulations.

[0273] A pharmaceutical composition of the invention may be prepared, packaged, or sold in bulk, as a single unit dose, or as a plurality of single unit doses. As used herein, a “unit dose” is discrete amount of the pharmaceutical composition comprising a predetermined amount of the active ingredient. The amount of the active ingredient is generally equal to the dosage of the active ingredient which would be administered to a subject or a convenient fraction of such a dosage such as, for example, one-half or one-third of such a dosage.

[0274] The relative amounts of the active ingredient, the pharmaceutically acceptable vehicle, and any additional ingredients in a pharmaceutical composition of the invention will vary, depending upon the identity, size, and condition of the subject treated and further depending upon the route by which the composition is to be administered. By way of example, the composition may comprise between 0.1% and 100% (w/w) active ingredient. A unit dose of a pharmaceutical composition of the invention will generally comprise from about 1 microgram to about 1 gram of the active ingredient, and preferably comprises from about 100 micrograms to about 100 milligrams of the active ingredient.

[0275] In addition to the active ingredient, a pharmaceutical composition of the invention may further comprise one or more additional pharmaceutical agents. Particularly contemplated additional agents include ingredients which can shield the BoNT HC fragment-entity complex from the effects of the acidic pH environment of portions of the gastrointestinal tract. Substantially all formulations and devices for effecting enteric delivery known or to be developed can be used. Further, as discussed above, the pharmaceutical composition may contain the one or more of the auxiliary proteins (e.g., SEQ ID NOs: SEQ ID NOs: 20 to 168, and 170 to 188) associated in nature with the BoNT toxin (HA(s) and NTNHs), especially if the composition is to be administered orally or via any portion of the gastrointestinal tract. Although it is known in the art that varying proteins are associated with varying serotypes of BoNT, it is not necessary that this correspondence is maintained in the practice of the invention.

[0276] Controlled- or sustained-release formulations of a pharmaceutical composition of the invention may be made using conventional technology.

[0277] A formulation of a pharmaceutical composition of the invention suitable for oral administration may be prepared, packaged, or sold in the form of a discrete solid dose unit including, but not limited to, a tablet, a hard or soft capsule, a cachet, a troche, or a lozenge, each containing a predetermined amount of the active ingredient. Other formulations suitable for oral administration include, but are not limited to, a powdered or granular formulation, an aqueous or oily suspension, an aqueous or oily solution, or an emulsion.

[0278] As used herein, an “oily” liquid is one which comprises a carbon-containing liquid molecule and which exhibits a less polar character than water.

[0279] A tablet comprising the active ingredient may, for example, be made by compressing or molding the active ingredient, optionally with one or more additional ingredients. Compressed tablets may be prepared by compressing, in a suitable device, the active ingredient in a free-flowing form such as a powder or granular preparation, optionally mixed with one or more of a binder, a lubricant, an excipient, a surface active agent, and a dispersing agent. Molded tablets may be made by molding, in a suitable device, a mixture of the active ingredient, a pharmaceutically acceptable vehicle, and at least sufficient liquid to moisten the mixture. Pharmaceutically acceptable excipients used in the manufacture of tablets include, but are not limited to, inert diluents, granulating and disintegrating agents, binding agents, and lubricating agents. Suitable dispersing agents include, but are not limited to, potato starch and sodium starch glycolate. Known surface active agents include, but are not limited to, sodium lauryl sulfate. Known diluents include, but are not limited to, calcium carbonate, sodium carbonate, lactose, microcrystalline cellulose, calcium phosphate, calcium hydrogen phosphate, and sodium phosphate. Suitable granulating and disintegrating agents include, but are not limited to, corn starch and alginic acid. Binding agents include, but are not limited to, gelatin, acacia, pre-gelatinized maize starch, polyvinylpyrrolidone, and hydroxypropyl methylcellulose. Lubricating agents include, but are not limited to, magnesium stearate, stearic acid, silica, and talc.

[0280] Tablets may be non-coated or they may be coated using known or to be developed methods to achieve delayed disintegration in the gastrointestinal tract of a subject, thereby providing sustained release and absorption of the active ingredient. By way of example, a material such as glyceryl monostearate or glyceryl distearate may be used to coat tablets. Further by way of example, tablets may be coated using methods described in U.S. Pat. Nos. 4,256,108; 4,160,452; and 4,265,874 to form osmotically-controlled release tablets. Tablets may further comprise a sweetening agent, a flavoring agent, a coloring agent, a preservative, or some combination of these in order to provide pharmaceutically elegant and palatable preparation.

[0281] Hard capsules comprising the active ingredient may be made using a physiologically degradable composition, such as gelatin. Such hard capsules comprise the active ingredient, and may further comprise additional ingredients including, for example, an inert solid diluent such as calcium carbonate, calcium phosphate, or kaolin.

[0282] Soft gelatin capsules comprising the active ingredient may be made using a physiologically degradable composition, such as gelatin. Such soft capsules comprise the active ingredient, which may be mixed with water or an oil medium such as peanut oil, liquid paraffin, or olive oil.

[0283] Oral compositions may be made, using known technology, which specifically release orally-administered agents in the small or large intestines of a human patient. For example, formulations for delivery to the gastrointestinal system, including the colon, include enteric coated systems, based, e.g., on methacrylate copolymers such as poly(methacrylic acid, methyl methacrylate), which are only soluble at pH 6 and above, so that the polymer only begins to dissolve on entry into the small intestine. The site where such polymer formulations disintegrate is dependent on the rate of intestinal transit and the amount of polymer present. For example, a relatively thick polymer coating is used for delivery to the proximal colon (Hardy et al., 1987 Aliment. Pharmacol. Therap. 1:273-280). Polymers capable of providing site-specific colonic delivery can also be used, wherein the polymer relies on the bacterial flora of the large bowel to provide enzymatic degradation of the polymer coat and hence release of the drug. For example, azopolymers (U.S. Pat. No. 4,663,308), glycosides (Friend et al., 1984, J. Med. Chem. 27:261-268) and a variety of naturally available and modified polysaccharides (PCT GB89/00581) may be used in such formulations.

[0284] Pulsed release technology such as that described in U.S. Pat. No. 4,777,049 may also be used to administer the active agent to a specific location within the gastrointestinal tract. Such systems permit drug delivery at a predetermined time and can be used to deliver the active agent, optionally together with other additives that my alter the local microenvironment to promote agent stability and uptake, directly to the colon, without relying on external conditions other than the presence of water to provide in vivo release.

[0285] Liquid formulations of a pharmaceutical composition of the invention which are suitable for oral administration may be prepared, packaged, and sold either in liquid form or in the form of a dry product intended for reconstitution with water or another suitable vehicle prior to use.

[0286] Liquid suspensions may be prepared using conventional methods to achieve suspension of the active ingredient in an aqueous or oily vehicle. Aqueous vehicles include, for example, water and isotonic saline. Oily vehicles include, for example, almond oil, oily esters, ethyl alcohol, vegetable oils such as arachis, olive, sesame, or coconut oil, fractionated vegetable oils, and mineral oils such as liquid paraffin. Liquid suspensions may further comprise one or more additional ingredients including, but not limited to, suspending agents, dispersing or wetting agents, emulsifying agents, demulcents, preservatives, buffers, salts, flavorings, coloring agents, and sweetening agents. Oily suspensions may further comprise a thickening agent. Suspending agents include, but are not limited to, sorbitol syrup, hydrogenated edible fats, sodium alginate, polyvinylpyrrolidone, gum tragacanth, gum acacia, and cellulose derivatives such as sodium carboxymethylcellulose, methylcellulose, and hydroxypropylmethylcellulose. Dispersing or wetting agents include, but are not limited to, naturally-occurring phosphatides such as lecithin, condensation products of an alkylene oxide with a fatty acid, with a long chain aliphatic alcohol, with a partial ester derived from a fatty acid and a hexitol, or with a partial ester derived from a fatty acid and a hexitol anhydride (e.g. polyoxyethylene stearate, heptadecaethyleneoxycetanol, polyoxyethylene sorbitol monooleate, and polyoxyethylene sorbitan monooleate, respectively). Emulsifying agents include, but are not limited to, lecithin and acacia. Preservatives include, but are not limited to, methyl, ethyl, or n-propyl-para-hydroxybenzoates, ascorbic acid, and sorbic acid. Sweetening agents include, for example, glycerol, propylene glycol, sorbitol, sucrose, and saccharin. Thickening agents for oily suspensions include, for example, beeswax, hard paraffin, and cetyl alcohol.

[0287] Liquid solutions of the active ingredient in aqueous or oily solvents may be prepared in substantially the same manner as liquid suspensions, the primary difference being that the active ingredient is dissolved, rather than suspended in the solvent. Liquid solutions of the pharmaceutical composition of the invention may comprise each of the components described with regard to liquid suspensions, it being understood that suspending agents will not necessarily aid dissolution of the active ingredient in the solvent. Aqueous solvents include, for example, water and isotonic saline. Oily solvents include, for example, almond oil, oily esters, ethyl alcohol, vegetable oils such as arachis, olive, sesame, or coconut oil, fractionated vegetable oils, and mineral oils, such as liquid paraffin.

[0288] Powdered and granular formulations of a pharmaceutical preparation of the invention may be prepared using known methods. Such formulations may be administered directly to a subject, used, for example, to form tablets, to fill capsules, or to prepare an aqueous or oily suspension or solution by addition of an aqueous or oily vehicle thereto. Each of these formulations may further comprise one or more of dispersing or wetting agent, a suspending agent, and a preservative. Additional excipients, such as fillers and sweetening, flavoring, or coloring agents, may also be included in these formulations.

[0289] A pharmaceutical composition of the invention may also be prepared, packaged, or sold in the form of oil-in-water emulsion or a water-in-oil emulsion. The oily phase may be a vegetable oil such as olive or arachis oil, a mineral oil such as liquid paraffin, or a combination of these. Such compositions may further comprise one or more emulsifying agents such as naturally occurring gums such as gum acacia or gum tragacanth, naturally-occurring phosphatides such as soybean or lecithin phosphatide, esters or partial esters derived from combinations of fatty acids and hexitol anhydrides such as sorbitan monooleate, and condensation products of such partial esters with ethylene oxide such as polyoxyethylene sorbitan monooleate. These emulsions may also contain additional ingredients including, for example, sweetening or flavoring agents.

[0290] A pharmaceutical composition of the invention may be prepared, packaged, or sold in a formulation suitable for rectal administration. Such a composition may be in the form of, for example, a suppository, a retention enema preparation, and a solution for rectal or colonic irrigation.

[0291] Suppository formulations may be made by combining the active ingredient with a non-irritating pharmaceutically acceptable excipient which is solid at ordinary room temperature (i.e., about 20° C.) and which is liquid at the rectal temperature of the subject (i.e. about 37° C. in a healthy human). Suitable pharmaceutically acceptable excipients include, but are not limited to, cocoa butter, polyethylene glycols, and various glycerides. Suppository formulations may further comprise various additional ingredients including, but not limited to, antioxidants and preservatives.

[0292] Retention enema preparations or solutions for rectal or colonic irrigation may be made by combining the active ingredient with a pharmaceutically acceptable liquid vehicle. As is well known in the art, enema preparations may be administered using, and may be packaged within, a delivery device adapted to the rectal anatomy of the subject. Enema preparations may further comprise various additional ingredients including, but not limited to, antioxidants and preservatives.

[0293] A pharmaceutical composition of the invention may be prepared, packaged, or sold in a formulation suitable for vaginal administration. Such a composition may be in the form of, for example, a suppository, an impregnated or coated vaginally-insertable material such as a tampon, a douche preparation, or a solution for vaginal irrigation.

[0294] Methods for impregnating or coating a material with a chemical composition are known in the art, and include, but are not limited to methods of depositing or binding a chemical composition onto a surface, methods of incorporating a chemical composition into the structure of a material during the synthesis of the material (i.e., such as with a physiologically degradable material), and methods of absorbing an aqueous or oily solution or suspension into an absorbent material, with or without subsequent drying.

[0295] Douche preparations or solutions for vaginal irrigation may be made by combining the active ingredient with a pharmaceutically acceptable liquid vehicle. As is well known in the art, douche preparations may be administered using, and may be packaged within, a delivery device adapted to the vaginal anatomy of the subject. Douche preparations may further comprise various additional ingredients including, but not limited to, antioxidants, antibiotics, antifungal agents, and preservatives.

[0296] As used herein, “parenteral administration” of a pharmaceutical composition includes any route of administration characterized by physical breaching of a tissue of a subject and administration of the pharmaceutical composition through the breach in the tissue. Parenteral administration thus includes, but is not limited to, administration of a pharmaceutical composition by injection of the composition, by application of the composition through a surgical incision, by application of the composition through a tissue-penetrating non-surgical wound, and the like. In particular, parenteral administration is contemplated to include, but is not limited to, subcutaneous, intraperitoneal, intravenous, intra-arterial, intramuscular, or intrasternal injection and intravenous, intra-arterial, or kidney dialytic infusion techniques.

[0297] Formulations of a pharmaceutical composition suitable for parenteral administration comprise the fragment-linked active ingredient combined with a pharmaceutically acceptable vehicle, such as sterile water or sterile isotonic saline. Such formulations may be prepared, packaged, or sold in a form suitable for bolus administration or for continuous administration. Injectable formulations may be prepared, packaged, or sold in unit dosage form, such as in ampoules, in multi-dose containers containing a preservative, or in single-use devices for auto-injection or injection by a medical practitioner. Formulations for parenteral administration include, but are not limited to, suspensions, solutions, emulsions in oily or aqueous vehicles, pastes, and implantable sustained-release or biodegradable formulations. Such formulations may further comprise one or more additional ingredients including, but not limited to, suspending, stabilizing, or dispersing agents. In one embodiment of a formulation for parenteral administration, the active ingredient is provided in dry (i.e., powder or granular) form for reconstitution with a suitable vehicle (e.g., sterile pyrogen-free water) prior to parenteral administration of the reconstituted composition.

[0298] The pharmaceutical compositions may be prepared, packaged, or sold in the form of a sterile injectable aqueous or oily suspension or solution. This suspension or solution may be formulated according to the art, and may comprise, in addition to the active ingredient, additional ingredients such as the dispersing agents, wetting agents, or suspending agents described herein. Such sterile injectable formulations may be prepared using a non-toxic parenterally-acceptable diluent or solvent, such as water or 1,3-butane diol, for example. Other acceptable diluents and solvents include, but are not limited to, Ringer's solution, isotonic sodium chloride solution, and fixed oils such as synthetic mono- or di-glycerides. Other parentally-administrable formulations which are useful include those which comprise the active ingredient in microcrystalline form, in a liposomal preparation, or as a component of a biodegradable polymer systems. Compositions for sustained release or implantation may comprise pharmaceutically acceptable polymeric or hydrophobic materials such as an emulsion, an ion exchange resin, a sparingly soluble polymer, or a sparingly soluble salt.

[0299] Formulations suitable for topical administration include, but are not limited to, liquid or semi-liquid preparations such as liniments, lotions, oil-in-water or water-in-oil emulsions such as creams, ointments or pastes, and solutions or suspensions. Topically-administrable formulations may, for example, comprise from about 1% to about 10% (w/w) active ingredient, although the concentration of the active ingredient may be as high as the solubility limit of the active ingredient in the solvent. Formulations for topical administration may further comprise one or more of the additional ingredients described herein. Topically administered formulations should be adapted for application to a non-keratinized epithelial tissue (e.g., the inside of the mouth, nose, or throat), and can be provided together with an applicator or dispenser for achieving such application.

[0300] A pharmaceutical composition of the invention may be prepared, packaged, or sold in a formulation suitable for pulmonary administration via the buccal cavity. Such a formulation may comprise dry particles which comprise the active ingredient and which have a diameter in the range from about 0.5 to about 7 nanometers, and preferably from about 1 to about 6 nanometers. Such compositions are conveniently in the form of dry powders for administration using a device comprising a dry powder reservoir to which a stream of propellant may be directed to disperse the powder or using a self-propelling solvent/powder-dispensing container such as a device comprising the active ingredient dissolved or suspended in a low-boiling propellant in a sealed container. Preferably, such powders comprise particles wherein at least 98% of the particles by weight have a diameter greater than 0.5 nanometers and at least 95% of the particles by number have a diameter less than 7 nanometers. More preferably, at least 95% of the particles by weight have a diameter greater than 1 nanometer and at least 90% of the particles by number have a diameter less than 6 nanometers. Dry powder compositions preferably include a solid fine powder diluent such as sugar and are conveniently provided in a unit dose form.

[0301] Low boiling propellants generally include liquid propellants having a boiling point of below 65° F. at atmospheric pressure. Generally the propellant may constitute 50 to 99.9% (w/w) of the composition, and the active ingredient may constitute 0.1 to 20% (w/w) of the composition. The propellant may further comprise additional ingredients such as a liquid non-ionic or solid anionic surfactant or a solid diluent (preferably having a particle size of the same order as particles comprising the active ingredient).

[0302] Pharmaceutical compositions of the invention formulated for pulmonary delivery may also provide the active ingredient in the form of droplets of a solution or suspension. Such formulations may be prepared, packaged, or sold as aqueous or dilute alcoholic solutions or suspensions, optionally sterile, comprising the active ingredient, and may conveniently be administered using any nebulization or atomization device. Such formulations may further comprise one or more additional ingredients including, but not limited to, a flavoring agent such as saccharin sodium, a volatile oil, a buffering agent, a surface active agent, or a preservative such as methylhydroxybenzoate. The droplets provided by this route of administration preferably have an average diameter in the range from about 0.1 to about 200 nanometers.

[0303] The formulations described herein as being useful for pulmonary delivery are also useful for intranasal delivery of a pharmaceutical composition of the invention.

[0304] Another formulation suitable for intranasal administration is a coarse powder comprising the active ingredient and having an average particle from about 0.2 to 500 micrometers. Such a formulation is administered in the manner in which snuff is taken i.e., by rapid inhalation through the nasal passage from a container of the powder held close to the nares.

[0305] Formulations suitable for nasal administration may, for example, comprise from about as little as 0.1% (w/w) and as much as 100% (w/w) of the active ingredient, and may further comprise one or more of the additional ingredients described herein.

[0306] A pharmaceutical composition of the invention may be prepared, packaged, or sold in a formulation suitable for buccal administration. Such formulations may, for example, be in the form of tablets or lozenges made using conventional methods, and may, for example, 0.1 to 20% (w/w) active ingredient, the balance comprising an orally dissolvable or degradable composition and, optionally, one or more of the additional ingredients described herein. Alternately, formulations suitable for buccal administration may comprise a powder or an aerosolized or atomized solution or suspension comprising the active ingredient. Such powdered, aerosolized, or aerosolized formulations, when dispersed, preferably have an average particle or droplet size in the range from about 0.1 to about 200 nanometers, and may further comprise one or more of the additional ingredients described herein.

[0307] A pharmaceutical composition of the invention may be prepared, packaged, or sold in a formulation suitable for ophthalmic administration. Such formulations may, for example, be in the form of eye drops including, for example, a 0.1-1.0% (w/w) solution or suspension of the active ingredient in an aqueous or oily liquid vehicle. Such drops may further comprise buffering agents, salts, or one or more other of the additional ingredients described herein. Other ophthalmalmically-administrable formulations which are useful include those which comprise the active ingredient in microcrystalline form or in a liposomal preparation.

[0308] As used herein, “additional ingredients” include, but are not limited to, one or more of the following: excipients; surface active agents; dispersing agents; inert diluents; granulating and disintegrating agents; binding agents; lubricating agents; sweetening agents; flavoring agents; coloring agents; preservatives; physiologically degradable compositions such as gelatin; aqueous vehicles and solvents; oily vehicles and solvents; suspending agents; dispersing or wetting agents; emulsifying agents, demulcents; buffers; salts; thickening agents; fillers; emulsifying agents; antioxidants; antibiotics; antifungal agents; stabilizing agents; and pharmaceutically acceptable polymeric or hydrophobic materials. Other “additional ingredients” which may be included in the pharmaceutical compositions of the invention are known in the art and described, for example in Genaro, ed., 1985, Remington's Pharmaceutical Sciences, Mack Publishing Co., Easton, Pa., U.S.A., which is incorporated herein by reference.

[0309] It is understood that the ordinarily skilled physician or veterinarian will readily determine and prescribe an effective amount of the compound to treat, ameliorate, relieve, inhibit, prevent, reduce a disorder in the subject or to elicit an immune response. In so proceeding, the physician or veterinarian may, for example, prescribe a relatively low dose at first, subsequently increasing the dose until an appropriate response is obtained. It is further understood, however, that the specific dose level for any particular subject will depend upon a variety of factors including the activity of the specific compound employed, the age, body weight, general health, gender, and diet of the subject, the time of administration, the route of administration, the rate of excretion, any drug combination, and the severity of the disorder.

[0310] Another aspect of the invention relates to a kit comprising a pharmaceutical composition of the invention and an instructional material. As used herein, an “instructional material” includes a publication, a recording, a diagram, or any other medium of expression which is used to communicate the usefulness of the pharmaceutical composition of the invention for treating, ameliorating, relieving, inhibiting, preventing, or reducing a disorder in a subject or for administering such a composition via a route described herein. The instructional material may also, for example, describe an appropriate dose of the pharmaceutical composition of the invention. The instructional material of the kit of the invention may, for example, be affixed to a container which contains a pharmaceutical composition of the invention or be shipped together with a container which contains the pharmaceutical composition. Alternatively, the instructional material may be shipped separately from the container with the intention that the instructional material and the pharmaceutical composition be used cooperatively by the recipient.

[0311] The invention also includes a kit comprising a pharmaceutical composition of the invention and a delivery device for delivering the composition to a subject. By way of example, the delivery device may be a squeezable spray bottle, a metered-dose spray bottle, an aerosol spray device, an atomizer, a dry powder delivery device, a self-propelling solvent/powder-dispensing device, a syringe, a needle, a tampon, or a dosage measuring container. The kit may further comprise an instructional material as described herein.

[0312] The invention is now described with reference to the following Examples. These Examples are provided for the purpose of illustration only. The invention is not limited to these Examples, but rather encompasses all variations which are evident as a result of the teaching provided herein.

### EXAMPLES

[0313] The results of experiments detailed in the Examples are summarized in Table 1.

TABLE 1

| Example | | | Cell | Transport | Transport | Transport Rate |
|---|---|---|---|---|---|---|
| No. | Molecule^{A} | Serotype | Type^{B} | A--->B^{C} | B--->A^{C} | (fmol/hr/cm²)^{D} |
| 1 | BoNT | A | T-84 | + | | FIG. 3 |
| 2 | BoNT | A | MDCK | − | | FIG. 4 |
| 3 | ¹²⁵I-BoNT | A | T-84 | + | | 11.29 ± 0.30 |
| 4 | ¹²⁵I-BoNT | A | T-84 | | + | 8.98 ± 0.20 |
| 5 | ¹²⁵I-BoNT | A | Caco-2 | + | | 8.42 ± 0.49 |
| 6 | ¹²⁵I-BoNT | A | MDCK | ± | | 0.05 ± 0.01 |
| 7 | ¹²⁵I-uBoNT | B | T-84 | + | | 9.01 ± 0.44 |
| 8 | ¹²⁵I-uBoNT | B | MDCK | − | | 0.05 ± 0.00 |
| 9 | ¹²⁵I-uBoNT | B | T-84 | | + | 4.48 ± 0.00 |
| 10 | ¹²⁵I-uBoNT | B | MDCK | | − | 0.05 ± 0.00 |
| 11 | ¹²⁵I-nBoNT | B | T-84 | + | | 6.57 ± 0.07 |
| 12 | ¹²⁵I-nBoNT | B | MDCK | − | | 0.05 ± 0.00 |
| 13 | ¹²⁵I-nBoNT | B | T-84 | | + | 5.54 ± 0.00 |
| 14 | ¹²⁵I-nBoNT | B | MDCK | | − | 0.05 ± 0.00 |
| 15 | HC | A | T-84 | + | | FIG. 5 |
| 16 | HC | A | MDCK | − | | FIG. 6 |
| 17 | ¹²⁵I-HC | A | T-84 | + | | 7.10 ± 0.00 |
| 18 | ¹²⁵I-HC | A | MDCK | − | | 0.06 ± 0.00 |
| 19 | 66Khc | A | T-84 | + | | FIG. 7 |
| 20 | 66kHC | A | MDCK | − | | FIG. 8 |
| 21 | 50kHC | A | T-84 | + | | FIG. 9 |
| 22 | 50kHC | A | MDCK | − | | FIG. 10 |
| 23 | ¹²⁵I-50kHC | A | T-84 | + | | 13.97 ± 0.00 |
| 24 | ¹²⁵I-50kHC | A | MDCK | − | | 0.06 ± 0.00 |
| 25 | AF-BoNT | A | T-84 | + | | FIG. 11 |
| 26 | AF-BoNT | A | MDCK | − | | FIG. 12 |
| 27 | bt-50kHC | A | T-84 | + | | FIG. 13 |
| 28 | bt-50kHC | A | MDCK | − | | FIG. 14 |
| 29 | GFP-66kHC | A | T-84 | + | | FIG. 15 |
| 30 | GFP-66kHC | A | MDCK | − | | FIG. 16 |
| 31 | Stag-50kHC | A | T-84 | + | | FIG. 17 |
| 32 | Stag-50kHC | A | MDCK | − | | FIG. 18 |
| 33 | GST-88kHC | A | T-84 | + | | FIG. 19 |
| 34 | GST-88kHC | A | MDCK | − | | FIG. 20 |
| 35 | GST-66kHC | A | T-84 | + | | FIG. 21 |
| 36 | GST-66kHC | A | MDCK | − | | FIG. 22 |
| 37 | ¹²⁵I-BoNT | A | Calu-3 | + | | 0.422 ± 0.076 |
| 38 | ¹²⁵I-BoNT | A | Calu-3 | | + | 0.206 ± 0.037 |
| 39 | ¹²⁵I-HC | A | Calu-3 | + | | 0.198 ± 0.007 |
| 40 | ¹²⁵I-HC | A | Calu-3 | | + | 0.112 ± 0.033 |
| 41 | ¹²⁵I-BoNT | A | RAEC | + | | 0.376 ± 0.014 |
| 42 | ¹²⁵I-BoNT | A | RAEC | | + | 0.159 ± 0.027 |
| 43 | ¹²⁵I-HC | A | RAEC | + | | 0.140 ± 0.050 |
| 44 | ¹²⁵I-HC | A | RAEC | | + | 0.132 ± 0.026 |
| 45 | ¹²⁵I-BoNT | A | mRT | + | | FIG. 23 |
| 46 | ¹²⁵I-HC | A | mRT | + | | FIG. 24 |
| 47 | 6xHis-50kHC | A | mRT | + | | FIG. 25 |
| 48 | GST-50kHC | A | mRT | + | | FIG. 26 |
| 49 | GST-50kHC | A | mRT | + | | FIG. 27 |
| 50 | 6xHis-50kHC | A | mRT | + | | ± |
| 51 | CTBS-50kHC | A | mRT | + | | FIG. 28 |
| 52 | full length HC | A | oral | + | | FIG. 29 |
| | (100 kDa) | | | | | |
| 53 | HC and its fragments | A & B | in vivo; | + | + | — |
| | | | in vitro | | | |

^{A}Abbreviations are as follows: BoNT = Clostridium botulinum neurotoxin (holotoxin); nBoNT = nicked BoNT, i.e., BoNT precursor polypeptide that has been cleaved into HC and LC, that are linked by a disulfide bond; uBoNT = un-nicked BoNT i.e., BoNT precursor polypeptide (150 kDa) that remains uncleaved; HC = heavy chain of Clostridium botulinum neurotoxin; 88kHC = 88 kilodalton HC carboxyterminal fragment (see FIG. 2); 66kHC = 66 kilodalton HC carboxyterminal fragment (see FIG. 2); 50kHC = 50 kilodalton HC carboxyterminal fragment (see FIG. 2); 48kHC = the 50kHC fragment from which 2 kilodaltons of the carboxy terminus have been excised (see FIG. 2); AF = ALEXA FLUOR ® 568 fluorescent dye; bt = biotin; GFP = green fluorescent protein; GST = glutathione-S-transferase; Stag = S-TAG ™ System (15aa S•Tag peptide with ribonuclease S-protein, available from Novagen, Inc., Madison, Wisconsin, U.S.A.); 6xhis = hexahistidine label; and CTBS = cholera toxin B subunit.
^{B}Cell types are as follows: T-84 = T-84 human gut epithelial cells; MDCK = Madin-Darby canine kidney epithelial cells; Caco-2 = Caco-2 human gut epithelial cells; Calu-3 = Calu-3 human pulmonary epithelial cells; RAEC = rat alveolar epithelial cells; and mRT = murine respiratory tract cells, in vivo.
^{C}A = apical face of cells and B = basolateral face of cells.
^{D}Rates are reported as mean ± standard error of the mean, in femtomoles per hour per square centimeter of epithelium surface.

[0314] The materials and methods used in the examples described herein, except as noted in the individual examples, are now described.

### Native and Recombinant Proteins

### Native Toxin and Native Chains

[0315] Botulinum neurotoxin (BoNT), as well as the HC and light chain (LC) components, was isolated by standard techniques that have been well described in the literature (DasGupta and Sathyamoorthy, 1984; Simpson et al., 1988).

### Construction of the Plasmid Expressing the BoNT LC

[0316] Standard techniques for DNA fragment isolation, repair of overhanging ends with the Klenow fragment of DNA polymerase I, and ligation with T4 DNA ligase were used. All cloning steps and expression were performed in E. coli M-15 (obtained from Qiagen, Chatsworth, Calif., U.S.A.) containing the pREP4 repressor plasmid. A DNA fragment coding for the BoNT LC (rL chain) was amplified from plasmid pCL8 using primers having the following sequences: forward, CCCAATAACA ATTAACAACT TTAAT (SEQ ID NO: 8); and reverse, TTTctgcagC TATTTATTAT ATAATGATCT ACCATC (SEQ ID NO: 9), where the PstI restriction site is in lowercase characters. One cytosine was added to the 5′ end of the forward primer to provide for reconstruction of the BamHI restriction site, as well as to clone light-chain DNA in frame with the pQE-30 initiation of translation methionine. In the reverse primer, a PstI restriction site was introduced immediately downstream of the stop codon. The amplified product was purified, treated with T4 polymerase, cut with PstI, and inserted between the Klenow-filled-in BamHI and PstI restriction sites of the expression vector pQE-30 to yield plasmid pQE-LC1. The structure of pQE-LC1 was confirmed by DNA sequencing.

### Construction of Plasmid Expressing Truncation Mutants of HC (Carboxyterminal HC Fragment)

[0317] The structural gene (having the nucleotide sequence SEQ ID NO: 10, as listed in GENEBANK™ accession no. X73423) encoding the eighty-eight kilodalton (88K), sixty-six kilodalton (66K), or fifty kilodalton (50K) fragments of HC of BoNT serotype A (BoNT A) were generated by PCR. These HC fragments are herein designated “88 kHC,” “66 kHC,” and “50 kHC.”

[0318] DNA fragment (nucleotide residues 1609-3987 of SEQ ID NO: 10; SEQ ID NO: 11) encoding 88 kHC was amplified using the following oligonucleotide primers: forward primer (nucleotide residues 1609-1632 of SEQ ID NO: 10) CGCggtaccA CCTTTAATTT TGATAATGAA CCT (SEQ ID NO: 12), reverse primer (nucleotide residues 3987-3968 of SEQ ID NO: 10) AACCCctgca gTTACAGTGG CCTTTCTCCC C (SEQ ID NO: 13), where the KpnI restriction site in the forward primer sequence and the PstI restriction site in the reverse primer sequence are in lower case characters.

[0319] DNA fragment (nucleotide residues 2170-3987 of SEQ ID NO: 10; SEQ ID NO: 14) encoding 66 kHC was amplified using the following oligonucleotide primers: forward primer (nucleotide residues 2170-2193 of SEQ ID NO: 10) CGCggtaccG TTCAAACAAT AGATAATGCT TTA (SEQ ID NO: 15), reverse primer (nucleotide residues 3987-3968 of SEQ ID NO: 10) AACCCctgca gTTACAGTGG CCTTTCTCCC C (SEQ ID NO: 13), where the KpnI restriction site in the forward primer sequence and the PstI restriction site in the reverse primer sequence are in lower case characters.

[0320] DNA fragment (nucleotide residues 2689-3987 of SEQ ID NO: 10; SEQ ID NO: 16) encoding 50 kHC was amplified using the following oligonucleotide primers: forward primer (nucleotide residues 2689-2712 of SEQ ID NO: 10) TCTTggatcc ACATTTACTG AATATATTAA GAAT (SEQ ID NO: 17), reverse primer (nucleotide residues 3987-3968 of SEQ ID NO: 10) TTCTgagctc TTACAGTGCC TTTCTCCCC (SEQ ID NO: 192), where the BamHI restriction site in the forward primer sequence and the SacI restriction site in the reverse primer sequence are in lower case characters.

[0321] PCR amplified fragments encoding deletion derivatives of the BoNT HC were treated with respective restriction endonucleases and cloned into plasmid pQE-30 in frame with the ATG codon and a 6×His Tag. The three resultant clones thus obtained were designated as pQE-BoNT/A HC88, pQE-BoNT/A HC66 and pQE-BoNT/A HC50, harboring deletion fragments of the BoNT A HC gene encoding 88 kHC, 66 kHC and 50 kHC, respectively. All cloning and expression were performed in E. coli strain BL21 codon plus (DE3)-RIL (obtained from Stratagene, La Jolla, Calif., U.S.A.). All the recombinant clones were confirmed by DNA sequencing.

### Construction of Plasmid Expressing GFP-66 kHC Fusion

[0322] The coding sequence of green fluorescent protein (GFP) was generated by PCR. A DNA fragment encoding 26 kilodalton (26K) GFP protein was amplified using primers having the following nucleotide sequences: forward primer ACATgcatgc ATGAGTAAAG GAGAAGAACT TTTCA (SEQ ID NO: 18), reverse primer CCggtaccCC AGGCCCATTT GTAGAGCTCA TC (SEQ ID NO: 19), where the SphI restriction site in the forward primer sequence and the KpnI restriction site in the reverse primer sequence are in lower case characters. The amplified fragment harboring GFP gene was treated with SphI and KpnI and inserted between the SphI and KpnI restriction sites of plasmid pQE-66 kHC. The resultant plasmid pQE-GFP-66 kHC contained the GFP gene in frame with the ATG codon, 6×His tag and 66 kHC gene.

### Expression and Purification of Recombinant Proteins

[0323] Cultures were grown in Lennox broth at 37° C., with shaking, to an absorbance value at 600 nanometers (A₆₀₀) of 0.6 to 0.8. Isopropyl-beta-D-thiogalactopyranoside (IPTG) was added to 1.0 millimolar (final concentration), and incubation was continued for an additional 5 hours. Bacteria from 1 liter of induced culture were harvested by centrifugation at 4° C. and re-suspended in 20 milliliters of 50 millimolar sodium phosphate buffer (pH. 7.4) with 300 millimolar NaCl. The cell suspension was lysed on ice by sonication, with two pulses of 1 minute each at 75% power, with a model 60 sonic dismembrator (Fisher Scientific, Malvern, Pa., U.S.A.). Lysates were centrifuged at 20000×g for 30 minutes at 4° C. The clarified supernatants were mixed with 2 milliliters of packed nitriletriacetic resin, incubated for one hour at 4° C. on a rotator, and finally poured into a 25-milliliter column.

[0324] The column was washed with 30 volumes of washing buffer (50 millimolar sodium phosphate (pH 6.0), 300 millimolar NaCl, 25 millimolar imidazole). Bound proteins were eluted with elution buffer (50 millimolar sodium phosphate (pH 4.5), 300 millimolar NaCl). Purified proteins were analyzed by sodium dodecyl sulfate-polyacrylamide gel electrophoresis (SDS-PAGE) and Western blotting.

### Nicking of BoNT

[0325] Botulinum toxin is expressed as a relatively inactive single chain molecule. To become fully active, the toxin must undergo proteolytic processing (“nicking”)” to yield its dichain form. In the laboratory, this is typically accomplished with trypsin.

[0326] In order to facilitate the subsequent separation of toxin from the nicking enzyme, TPCK (L-1-tosylamido-2-phenylethyl chloromethyl ketone) treated trypsin cross-linked to 4% beaded agarose was used (Immobilized Trypsin; PIERCE, Rockford, Ill., U.S.A.). The trypsin slurry was washed 3 times with reaction buffer (10 millimolar Sodium Phosphate Buffer, pH 7.5). Toxin was added and incubated with enzyme at room temperature (23° C.) for one hour at a 1:10 ratio of trypsin to toxin. After incubation, the reaction mixture was centrifuged at 10,000 rotations per minute in an Eppendorf tabletop centrifuge for 5 minutes. The supernatant containing “nicked” toxin was collected and stored at −20° C. Alternatively, “nicked” toxin can be separated from the beaded trypsin by filtration through a 0.2 micron centrifugal filter (Schleicher & Schuell Centrex Microfilter Unit) into a clean, sterile tube. A sample of the material is examined by electrophoresis to verify nicking.

### Reduction of BoNT

[0327] Dichain toxin consists of a LC (enzymatic portion) and a HC (binding and translocation portion) linked by a disulfide bond. This bond must be reduced (broken) for the light chain to exert its enzymatic activity, the cleavage of proteins responsible for neurotransmitter release. In order to perform in vitro cleavage experiments, native toxin has to be reduced.

[0328] Botulinum toxin was reduced by incubating it with dithiothreitol (DTT; Cleland's Reagent) in phosphate buffer at physiological pH (pH 7.2-7.4) or in phosphate buffered saline (PBS). The concentration of DTT typically used was 5 millimolar to 20 millimolar, depending on the experiment. The DTT and toxin reaction mixture was incubated at room temperature (23° C.) for one hour. Toxin reduction was verified by electrophoresis on non-reducing gels.

### Attachment of ¹²⁵I-Bolton Hunter Reagent (MW 387.2) to Purified BoNT and its Fragments

[0329] Bolton-Hunter reagent was purchased from PerkinElmer Life Sciences, Inc. (Boston, Mass., U.S.A.). This molecule is supplied with a reactive succinimidyl ester moiety that reacts with primary amines of proteins (e.g., lysine residues). The toxin, HC or its fragments were iodinated using (¹²⁵I)-Bolton Hunter reagent essentially according to manufacturer's instructions. The reaction time was reduced in order to diminish the loss of biological activity of the resulting product. The proteins were labeled to an average specific activity of 500 Curies per millimole or less.

[0330] Purified protein (350 micrograms) in borate buffer (pH 7.8; 200 microliters) was added to dried, iodinated ester and reacted on ice for fifteen minutes. The reaction was terminated by addition of 50 microliters of 1 molar glycine in borate buffer for fifteen minutes. The total reaction mixture (250 microliters) and rinse (250 microliters) were loaded onto a SEPHADEX™ G-25 column that was pre-equilibrated with filtration buffer (150 millimolar Na₂HPO₄, 150 millimolar NaCl, 0.1% (w/v) gelatin, pH 7.4). The labeled toxin was eluted with filtration buffer, and 0.5 milliliter fractions were collected. An aliquot (5 microliters) of each fraction was assayed for radioactivity. The labeled toxin peak, which eluted at void volume, was pooled and stored at 3° C. Toxin concentration in the pooled fraction was determined spectrophotometrically at 278 nanometers using the following relationship 1.63 A₂₇₈=1 milligram per milliliter. A portion of this sample was counted in a gamma-counter to quantify the labeled toxin. Sample concentration and associated counts were used to calculate specific activity. Labeled toxin was stored at 3° C.

### Attachment of ALEXA FLUOR® 568 (MW 792) to Purified BoNT

[0331] ALEXA FLUOR® 568 is a dye molecule with an absorption (excitation) maximum at 577 nanometers and an emission maximum at 603 nanometers. The dye was purchased from Molecular Probes (Eugene, Oreg., United States of America) and was used according to manufacturer's directions. This molecule is supplied with a reactive succinimidyl ester moiety that reacts with primary amines of proteins (e.g., lysine residues). 0.50 Milliliter of a 1.0 milligram per milliliter solution of PBS with purified BoNT A was supplemented with 50 microliters of 1.0 molar sodium bicarbonate, and subsequently added to the dye. The reaction continued with stirring for one hour at room temperature. Hydroxylamine solution (17 microliters) was added, and incubation was continued an additional 30 minutes at room temperature to stop the reaction. The entire reaction volume was then filtered through a gel filtration column equilibrated with and eluted with PBS. The first colored band that eluted from the column (labeled toxin) was collected and stored at 3° C. The amount of labeling was calculated according to the manufacturer's instructions, employing the extinction coefficients of the ALEXA FLUOR® dye and the toxin. The toxin used in transcytosis experiments was labeled with 3 to 7 moles of dye per mole of toxin.

### Transcytosis Assay

[0332] Monolayers of polarized epithelial cells are grown on polycarbonate membranes with a 0.4 micrometer pore size in TRANSWELL® (Corning-Costar, Cambridge, Mass., U.S.A.) porous bottom inserts. The TRANSWELL® apparatus permits containment of a product on either the apical or basolateral face of an epithelial cell culture. In the absence of transcytosis of the product across the epithelial cell layer, substantially all of the product is retained on one side of the epithelium by the apparatus. The TRANSWELL® apparatus is therefore useful for assessing transepithelial transcytosis of products.

[0333] The cell growth area within each TRANSWELL® insert is equivalent to one square centimeter. Prior to seeding cells, insert membranes were coated with 10 micrograms per square centimeter rat tail type I collagen. Collagen stock solution (6.7 milligrams per milliliter) was prepared in sterile 1% (v/v) acetic acid and stored at 3° C. This collagen stock solution was diluted, as needed, in ice cold 60% (v/v) ethanol, and 150 microliters of the resulting solution containing 10 micrograms of diluted collagen was added to each well.

[0334] The collagen solution was allowed to dry at room temperature overnight (about eighteen hours). After drying, the wells were sterilized under UV light for one hour, followed by a pre-incubation with cell culture medium (thirty minute incubation). The pre-incubation medium was removed immediately prior to addition of cells and fresh medium. Cells were plated in the TRANSWELL® apparatus at confluent density. The volumes of medium added were 0.5 milliliter to the upper chamber and 1.0 milliliter to the bottom chamber. Culture medium was changed every two days. The cultures maintained in twelve-well plates were allowed to differentiate a minimum of ten days before use. The integrity of cell monolayers and formation of tight junctions were visualized by monitoring the maintenance of a slightly higher medium meniscus in the inserts as compared to the bottom wells. Formation of tight junctions were confirmed experimentally by assaying the rate of (3H)-inulin diffusion from the top well into the bottom chamber or by measurement of transepithelial resistance across the monolayer.

[0335] Transcytosis was assayed by replacement of medium, usually in the top well, with an appropriate volume of medium containing various concentrations of (¹²⁵I)-labeled protein of interest. Transport of radiolabeled protein was monitored by sampling the entire content of opposite wells, which was usually the bottom wells. Aliquots (0.5 milliliter) of the sampled medium were filtered through a SEPHADEX™ G-25 column, and 0.5 milliliter fractions were collected. The amount of radioactivity in the fractions was determined using a gamma counter. The amount of transcytosed protein was normalized and expressed as femtomoles per hour per square centimeter of cultured cell surface. A minimum of two replicates per condition were included in each experiment, and experiments were typically reproduced at least three times.

### Toxicity Testing

### In Vitro Toxicity Testing

[0336] The toxicity of expressed proteins was bioassayed on mouse phrenic nerve-hemidiaphragm preparations. Tissues were excised and suspended in physiological buffer that was aerated with 95% O₂, 5% CO₂ and maintained at 35° C. The physiological solution had the following composition: 137 millimolar NaCl; 5 millimolar KCl; 1.8 millimolar CaCl₂; 1.0 millimolar MgSO₄; 24 millimolar NaHCO₃; 1.0 millimolar NaH₂PO₄; 11 millimolar D-glucose; and 0.01% (w/v) gelatin. Phrenic nerves were stimulated continuously (1.0 Hertz; 0.1-0.3 millisecond duration), and muscle twitch was recorded. Toxin-induced paralysis was measured as a 50% reduction in muscle twitch response to neurogenic stimulation.

### In Vivo Toxicity Testing

[0337] The toxicity of expressed proteins was tested by administering the proteins to laboratory mice. Proteins purified by elution from a histidine affinity resin or GST affinity resin were diluted in PBS including 1 milligram per milliliter bovine serum albumin (BSA) and injected intraperitoneally (i.p.) to mice. The recombinant proteins were administered in a 100 microliters aliquot of PBS-BSA at concentrations of 1 to 100 micrograms per animal (average weight of approximately 25 grams). Animals were monitored for varying lengths of time to detect any non-specific toxicity.

### Surgical Administration of Toxin or Fragments into Stomach or Intestine

[0338] Swiss-Webster mice (female, 25 grams each), were purchased from Ace Animals (Boyertown, Pa., U.S.A.) and allowed unrestricted access to food and water.

[0339] Pre-operative protocol involved fasting animals for eighteen hours prior to surgery, although allowing free access to water. Pre-operative preparation also included shaving the abdominal area and administering a prophylactic, subcutaneous dose of gentamicin sulfate (6 milligrams per kilogram body weight. (available from Fujusawa USA, Inc., Deerfield, Ill., U.S.A.). On the day of surgery, animals were transferred to a veterinary procedure room, and all subsequent steps were performed in an aseptic surgical environment.

[0340] Animals were anesthetized by administration of Isoflurane (ISO-THESIA™, Abbott Laboratories North, Chicago, Ill., U.S.A.) and oxygen, and this same inhalation anesthetic was administered throughout surgery. An abdominal laparotomy (about 1.5 to 2.5 centimeters, depending on the size of the mouse) was performed, and either the stomach or the small intestine immediately proximal to the stomach was partially externalized. If required by protocol, a ligature was placed immediately above (proximal to the stomach) the pyloric sphincter using 3-0 PROLENE™ (polypropylene suture, Ethicon, Inc., Somerville, N.J., U.S.A.). Care was taken so that this ligature was sufficient to prevent flow of stomach juices into the intestine (or reverse flow of intestinal contents into the stomach), but not sufficient to cause mechanical damage to the tissues involved. Neurotoxin was administered through a 1 milliliter tuberculin syringe with a 0.5 inch, 27 gauge needle. Injection volumes were kept constant at 100 microliters per animal regardless of site of administration (stomach or intestine). For all injections, the vehicle consisted of sterile Dulbecco's PBS (pH 7.4) with 1 milligram BSA per milliliter. Neurotoxin was administered into the lumen of the stomach by injection through the stomach wall at the greater curvature, with care to avoid the gastro-epiploic vessels. Neurotoxin was administered into the lumen of the small intestine by oblique insertion of the needle parallel to the segment and always in a direction away from the stomach. The time of injection was recorded.

[0341] After administration of neurotoxin, organs were gently repositioned and the incision in the abdominal muscle was sutured using 3-0 PROLENE™. The skin was closed using several small wound clips, after which animals received an analgesic injection of buprenorphine hydrochloride (2 milligrams per kilogram body weight subcutaneously; BUPRENEX® injectable, Reckitt & Colman Pharmaceuticals, Inc., Richmond, Va., United States of America) and another dose of Gentamicin.

[0342] The surgical procedure lasted approximately fifteen minutes per animal, and suspension of anesthesia resulted in full recovery within ten to fifteen minutes. Animals were then transferred to the laboratory where they were monitored for assay endpoint. The time of death was recorded, and total elapsed minutes from time of injection to time of death were calculated.

### Method for Immunization

[0343] Toxin variants that retain the ability to bind and cross gut and airway epithelial cells were tested for their abilities to evoke immunity following oral and/or intranasal administration. To be judged worthy of further consideration, a potential oral or inhalation vaccine had to evoke protection against at least 1000 MLD₅₀ of the parent toxin. Specific pathogen-free female Swiss-Webster mice were used in this work.

[0344] For subcutaneous (s.c.) immunization, animals received 1-20 micrograms protein in 0.1 milliliter of PBS. Four doses were given at fourteen day intervals. The mice were bled seven days after the second, third and fourth immunization and analyzed by immunoblotting for immunoreactivity to toxin variants. Mice were challenged with at least 1×10³ MLD₅₀ of parent toxin via the intraperitoneal (i.p.) route. Prior to injection, toxin was diluted in PBS containing 1% (w/v) gelatin. Mice were challenged fourteen days following their final vaccination, and untreated mice were used as controls.

[0345] For intranasal immunization, mice received 1-20 micrograms of protein suspended in 20 microliters of PBS. Mice were lightly anesthetized with isoflurane (ISO-THESIA™, Abbott Laboratories North, Chicago, Ill., U.S.A.). Protein was administered by a single application of 10 to 20 microliters of the suspension to the nares. The heads of animals were maintained in an upright position to minimize drainage into the posterior pharynx. Five doses were given at seven day intervals. The mice were bled seven days after the third, fourth, and fifth immunization and the specimens were analyzed by immunoblotting for immunoreactivity to toxin variants. Mice were challenged with at least 1×10³ MLD₅₀ of parent toxin via the i.p. route ten days following their final vaccination.

[0346] Oral immunizations were performed by inoculation of 1-20 micrograms of protein suspended in 100 microliters of PBS. Mice were lightly anesthetized with isoflurane (ISO-THESIA™, Abbott Laboratories North, Chicago, Ill., United States of America), and protein was administered by a single application via a feeding tube. Five doses were given at seven day intervals. The mice were bled seven days after the third, fourth, and fifth immunization, and specimens were analyzed by immunoblotting for immunoreactivity to toxin variants. Mice were challenged with at least 1×10³ MLD₅₀ of parent toxin via the i.p. route ten days following their final vaccination.

### Oral Immunization

[0347] Swiss-Webster mice (female, 20-25 grams each) were purchased from Ace Animals (Boyertown, Pa., U.S.A.) and allowed unrestricted access to food and water. The mice were immunized per os (p.o.). For p.o. administration, each animal was fed 4 micrograms of protein suspended in 0.2 milliliter elution buffer administered through an intragastric feeding needle. Mice were immunized on day 0, and boosters were given on days 14, 28, and 42. Samples of serum from identically immunized mice were collected and pooled on days 21, 35, and 49. For collection of serum, mice were bled with capillary tubes at the retro-orbital plexus while under isoflurane anesthesia.

[0348] Sera from immunized or control mice were assayed for antibodies using immunoblot analysis. Recombinant antigen (holotoxin or fragment; 0.1 microgram/lane) was separated by SDS-PAGE and transferred to nitrocellulose membranes. Membranes were blocked with 5% (w/v) non-fat powdered milk in Tris-buffered saline (TBS), cut into strips and processed for detection of immunoreactive proteins using various serum samples.

[0349] Primary incubations were performed overnight (eighteen hours) at room temperature with 1:1000 diluted serum. A secondary horseradish peroxidase-labeled anti-mouse IgG was used at 1:10000 dilution for one hour at room temperature. After extensive washing, membranes were developed using enhanced chemiluminescent reagents (ECL™, Amersham Biosciences, Piscataway, N.J., U.S.A.).

### Enzyme Linked Immunosorbent Assays (ELISA)

[0350] ELISA was performed as described by Siegel, with only minor modifications. Highly purified (>95%) BoNT A was diluted to 5 micrograms per milliliter in phosphate-buffered saline, pH 7.4, and then added to microtiter plates (100 microliters/well) that were incubated at 4° C. overnight in a sealed container.

[0351] One percent BSA in TBS with 0.1% (v/v) TWEEN™ 20 was used to block nonspecific binding. Serum samples were initially diluted 1:30 and then serially diluted fourfold for a total of seven dilutions (1:30 to 1:122, 880). Diluted sera were added in duplicate to toxin-coated wells (100 microliters per well). The secondary antibody was alkaline phosphatase-conjugated goat anti-human or anti-mouse IgA or IgG diluted 1:1000. The primary and secondary antibodies were incubated for sixty minutes at 37° C. p-Nitrophenyl phosphate (100 microliters per well) was added as a substrate. Plates were incubated at room temperature for 30 minutes, and absorbance was measured with a microplate reader at 405 nanometers. ELISA titers were defined as the reciprocal of the highest serum dilution giving an absorbance of 0.2 (absorbance units) above background.

### Capture ELISA for Detection of Recombinant BoNT Fragments in Mouse Plasma after Intranasal Administration

[0352] Microtiter plates were coated overnight at 4° C. with 100 microliters per well of a solution containing 1:1000 diluted rabbit anti-botulinum toxoid A in coating buffer (0.1 molar Na₂CO₃, pH 9.6). The remaining sites of absorption were then blocked by the addition of 1% (w/v) BSA in wash buffer (20 millimolar TBS, 0.1% (v/v) TWEEN™ 20, pH 7.6) for one hour at 37° C. The plates were then washed 4 times with wash buffer. Standard curves were prepared by diluting antigen with the appropriate volumes of assay buffer (20 millimolar TBS, pH 7.6) or the appropriate mouse serum. Standards and serum samples (100 microliters per well) were incubated for one hour at 37° C. and the plates were washed as described above. The 1:500 diluted mouse anti-BoNT A HC was added and incubated for one hour at 37° C. The plates were washed three times with wash buffer, and 100 microliters alkaline phosphatase-labeled goat anti-mouse IgG conjugate diluted (1:5000) in wash buffer was added and incubated for one hour at 37° C. After washing the plates, 100 microliters of substrate solution (p-nitrophenyl phosphate) in glycine buffer, pH 10.4 (0.1 molar glycine, 1 millimolar MgCl₂, and 1 millimolar ZnCl₂), was added to each well. The reaction was stopped after 30 minutes incubation at room temperature, and the absorbance was measured at 405 nanometers.

[0353] Cell types used in the examples include T-84 human gut epithelial cells (T-84 and Caco-2 cells), human pulmonary epithelial cells (Calu-3), and Madin-Darby canine kidney epithelial cells (MDCK cells). Cells of these types are available commercially, for example from American Tissue Culture Collection (ATCC), Manassas, Va., U.S.A. Primary cultures of rat epithelial alveolar cells were also used.

### Example 1

### Detection of Transcytosis of BoNT A from the Apical Surface of T-84 Cells to the Basolateral Side of the Cells by Western Blotting

[0354] This experiment was carried out using native BoNT A and human gut epithelial cells (“T-84 cells”). Transcytosis was assayed in T-84 cell cultures using a TRANSWELL® apparatus assay system. Assay was initiated by addition of 1×10⁻⁸ molar native, purified, BoNT A to the upper chamber. Cultures were subsequently incubated for eighteen hours at 37° C. At the end of each experiment, contents of three basal chambers per condition were collected and concentrated in a CENTRICON™ micro-concentrator. The resulting solution was run on 7.5% (w/v) SDS-PAGE and subsequently transferred to nitrocellulose membranes. The identity and molecular weight of the transcytosed molecule was confirmed by Western blotting with anti-HC antibody.

[0355] A Western blot demonstrated that pre-transcytosis control (BoNT A) and BoNT A transcytosed through T-84 cells (i.e., collected from basal chamber) had approximately the same size. Thus, not only did the BoNT A efficiently cross T-84 cells, but the molecular weight of the molecule was unaltered, indicating that the mechanism by which transcytosis was accomplished did not result in modification of BoNT.

### Example 2

### Western Blot of Apical to Basolateral Transcytosed BoNT A in MDCK Cells

[0356] This experiment was carried out using BoNT A and Madin-Darby Canine Kidney Cells (“MDCK cells”). Transcytosis was assayed in MDCK cell cultures using a TRANSWELL® apparatus assay system. Assay was initiated by addition of 1×10⁻⁸ molar native, purified, BoNT A to the upper chamber. Cultures were subsequently incubated for eighteen hours at 37° C. At the end of each experiment, contents of three basal chambers per condition were collected and concentrated in a CENTRICON™ micro-concentrator. The resulting solution was run on 7.5% (w/v) SDS-PAGE and subsequently transferred to nitrocellulose membranes. The identity and molecular weight of the transcytosed molecule was confirmed by Western blotting with anti-HC antibody.

[0357] The Western blot indicated that native BoNT A is poorly bound, internalized, transcytosed, and released by MDCK cells. BoNT A was not detected in medium collected from the basolateral side of cells, leading to the conclusion that BoNT A did not efficiently cross MDCK cells.

### Example 3

### Apical to Basolateral Transcytosis of BoNT A in T-84 Cells

[0358] Transcytosis of BoNT A linked to ¹²⁵I at lysine residues was assayed in human gut epithelial cells (“T-84”) cell cultures using a TRANSWELL® apparatus assay system. Assay was initiated by addition of 1×10⁻⁸ molar (¹²⁵I)-BoNT A to the upper chamber. Cultures were subsequently incubated for eighteen hours at 37° C. At the end of each experiment contents of the basal chamber were collected and gel filtered. Void volume fractions were assayed for radioactivity and the toxin peak was summed to determine total counts. The amount of transcytosis was calculated based on the specific activity of labeled BoNT A.

[0359] The results indicate that BoNT A linked to ¹²⁵I was transported from the apical to the basolateral side of cells. It efficiently crossed T-84 cells at a transcytosis rate of 11.29±0.30 femtomoles per hour per square centimeter.

[0360] There are three major conclusions that stem from the experimental results. First, the purified botulinum neurotoxin is bound, internalized, transcytosed, and released by differentiated, polarized human gut epithelial cells. Second, modification of lysine residues by attachment of ¹²⁵I does not alter the ability of the holotoxin to display these properties. Third, the BoNT A is capable of transporting the ¹²⁵I-Bolton-Hunter reagent from the apical to the basolateral side of human gut epithelial cells.

### Example 4

### Basolateral to Apical Transcytosis of BoNT A in T-84 Cells

[0361] Transcytosis of BoNT A linked to ¹²⁵I at lysine residues was assayed in T-84 cell cultures using a TRANSWELL® apparatus assay system. Assay was initiated by addition of 1×10⁻⁸ molar (¹²⁵I)-BoNT A to the lower chamber. Cultures were subsequently incubated for eighteen hours at 37° C. At the end of each experiment contents of the upper chamber were collected and gel filtered. Void volume fractions were assayed for radioactivity and the toxin peak was summed to determine total counts. The amount of transcytosis was calculated based on the specific activity of labeled BoNT A.

[0362] The results show that BoNT A linked to ¹²⁵I was transported from the basolateral to the apical side of cells. It efficiently crossed T-84 cells, and the rate of transcytosis was quantified at 8.98±0.20 femtomoles per hour per square centimeter.

[0363] There are three major conclusions that stem from the experimental results. First, the purified botulinum neurotoxin is bound, internalized, transcytosed, and released by differentiated, polarized human gut epithelial cells. This process is somewhat less efficient in the basolateral to apical direction than in the reverse direction. Second, modification of lysine residues does not alter the ability of the holotoxin to display these properties. Third, the BoNT A is capable of transporting the ¹²⁵I-Bolton-Hunter reagent from the basolateral to the apical side of human gut epithelial cells.

### Example 5

### Apical to Basolateral Transcytosis of BoNT A in Caco-2 Cells

[0364] Transcytosis of BoNT A linked to 1251 at lysine residues was assayed in Caco-2 cell cultures using a TRANSWELL® apparatus assay system. Assay was initiated by addition of 1×10⁻⁸ molar (¹²⁵I)-BoNT A to the upper chamber. Cultures were subsequently incubated for eighteen hours at 37° C. At the end of each experiment, contents of the basal chamber were collected and gel filtered. Void volume fractions were assayed for radioactivity and the toxin peak was summed to determine total counts. The amount of transcytosis was calculated based on the specific activity of labeled toxin.

[0365] The results show that purified neurotoxin was transported from the apical to the basolateral side of cells. BoNT A efficiently crossed Caco-2 cells. The rate of transcytosis was quantified at 8.42±0.49 femtomoles per hour per square centimeter.

[0366] There are four major conclusions that stem from the experimental results. First, the purified botulinum neurotoxin is bound, internalized, transcytosed, and released by differentiated, polarized human gut epithelial cells. Second, modification of lysine residues does not alter the ability of the holotoxin to display these properties. Third, the BoNT A is capable of transporting the ¹²⁵I-Bolton-Hunter reagent from the apical to the basolateral side of human gut epithelial cells. Fourth, the HC is capable of transporting more than one molecule (LC & Bolton-Hunter reagent) at a time across human gut epithelial cells.

### Example 6

### Apical to Basolateral Transcytosis of BoNT A in MDCK Cells

[0367] Transcytosis of BoNT A linked to ¹²⁵I at the lysine residues was assayed in Madin-Darby Canine Kidney (“MDCK”) cell cultures using a TRANSWELL® apparatus assay system. Assay was initiated by addition of 1×10⁻⁸ molar (¹²⁵I)-BoNT A to the upper chamber. Cultures were subsequently incubated for eighteen hours at 37° C. At the end of each experiment, contents of the basal chamber were collected and gel filtered. Void volume fractions were assayed for radioactivity and the toxin peak was summed to determine total counts. The amount of transcytosis was calculated based on the specific activity of labeled BoNT A.

[0368] The results show that BoNT A was poorly transported from the apical to the basolateral side of cells. Purified neurotoxin did not efficiently cross MDCK cells, as evidenced by the rate of transcytosis of 0.05±0.01 femtomoles per hour per square centimeter.

[0369] The BoNT A is poorly bound, internalized, transcytosed, and released by polarized MDCK cells.

### Example 7

### Apical to Basolateral Transcytosis of Un-Nicked Botulinum Neurotoxin Serotype B in T-84 Cells

[0370] Transcytosis of un-nicked botulinum neurotoxin linked to ¹²⁵I at lysine residues was assayed in T-84 cell cultures using a TRANSWELL® apparatus assay system. Assay was initiated by addition of 1×10⁻⁸ molar (¹²⁵I)-uBoNT B to the upper chamber. Cultures were subsequently incubated for eighteen hours at 37° C. At the end of each experiment contents of the basal chamber were collected and gel filtered. Void volume fractions were assayed for radioactivity and the toxin peak was summed to determine total counts. The amount of transcytosis was calculated based on the specific activity of labeled uBoNT.

[0371] The results show that uBoNT was transported from the apical to the basolateral side of cells. It efficiently crossed T-84 cells at a rate of 9.01±0.44 femtomoles per hour per square centimeter.

[0372] There are four major conclusions that stem from the experimental results. First, the purified, un-nicked botulinum neurotoxin, serotype B, is bound, internalized, transcytosed, and released by differentiated, polarized human gut epithelial cells. Second, modification of lysine residues does not alter the ability of the uBoNT to display these properties. Third, the uBoNT is capable of transporting the ¹²⁵I-Bolton-Hunter reagent from the apical to the basolateral side of human gut epithelial cells. Fourth, the HC of uBoNT is capable of transporting more than one molecule (LC portion & Bolton-Hunter reagent) at a time across human gut epithelial cells.

### Example 8

### Apical to Basolateral Transcytosis of Un-Nicked Botulinum Neurotoxin Serotype B in MDCK Cells

[0373] Transcytosis of un-nicked botulinum neurotoxin linked to ¹²⁵I at lysine residues was assayed in Madin-Darby Canine Kidney (“MDCK”) cell cultures using a TRANSWELL® apparatus assay system. Assay was initiated by addition of 1×10⁻⁸ molar (¹²⁵I)-Botulinum toxin type B to the upper chamber. Cultures were subsequently incubated for eighteen hours at 37° C. At the end of each experiment, contents of the basal chamber were collected and gel filtered. Void volume fractions were assayed for radioactivity and the toxin peak was summed to determine total counts. The amount of transcytosis was calculated based on the specific activity of labeled toxin.

[0374] The results show that uBoNT B was poorly transported from the apical to the basolateral side of cells. It did not efficiently cross MDCK cells (0.05±0.00 femtomoles per hour per square centimeter). The uBoNT serotype B is poorly bound, internalized, transcytosed, and released by polarized MDCK cells.

### Example 9

### Basolateral to Apical Transcytosis of Un-Nicked Botulinum Neurotoxin Serotype B in T-84 Cells

[0375] Transcytosis of un-nicked botulinum neurotoxin linked to ¹²⁵I at lysine residues was assayed in T-84 cell cultures using a TRANSWELL® apparatus assay system. Assay was initiated by addition of 1×10⁻⁸ molar (¹²⁵I)-uBoNT B to the lower chamber. Cultures were subsequently incubated for eighteen hours at 37° C. At the end of each experiment contents of the apical chamber were collected and gel filtered. Void volume fractions were assayed for radioactivity and the toxin peak was summed to determine total counts. The amount of transcytosis was calculated based on the specific activity of labeled uBoNT.

[0376] The results show that uBoNT was transported from the basolateral to the apical side of cells. uBoNT efficiently crossed T-84 cells at a rate of 4.48±0.00 femtomoles per hour per square centimeter.

[0377] Several conclusions may be drawn. First, uBoNT is bound, internalized, transcytosed, and released by differentiated, polarized human gut epithelial cells. Second, modification of lysine residues does not alter the ability of uBoNT to display these properties. Third, the uBoNT is capable of transporting the ¹²⁵I-Bolton-Hunter reagent from the basolateral to the apical side of human gut epithelial cells. Fourth, the HC of uBoNT is capable of transporting more than one molecule (LC & Bolton-Hunter reagent) at a time across human gut epithelial cells.

### Example 10

### Basolateral to Apical Transcytosis of Un-Nicked Botulinum Neurotoxin Serotype B in MDCK Cells

[0378] Transcytosis of un-nicked botulinum neurotoxin linked to ¹²⁵I at lysine residues was assayed in Madin-Darby Canine Kidney (“MDCK”) cell cultures using a TRANSWELL® apparatus assay system. Assay was initiated by addition of 1×10⁻⁸ molar (¹²⁵I)-uBoNT to the lower chamber. Cultures were subsequently incubated for eighteen hours at 37° C. At the end of each experiment, contents of the apical chamber were collected and gel filtered. Void volume fractions were assayed for radioactivity and the toxin peak was summed to determine total counts. The amount of transcytosis was calculated based on the specific activity of labeled uBoNT.

[0379] The results show that purified uBoNT was poorly transported from the basolateral to the apical side of cells. Purified uBoNT did not efficiently cross MDCK cells (0.05±0.00 femtomoles per hour per square centimeter).

[0380] The purified uBoNT B is poorly bound, internalized, transcytosed, and released by polarized MDCK cells.

### Example 11

### Apical to Basolateral Transcytosis of Nicked Botulinum Neurotoxin Serotype B in T-84 Cells

[0381] Transcytosis of nicked BoNT B linked to ¹²⁵I at lysine residues was assayed in T-84 cell cultures using a TRANSWELL® apparatus assay system. Assay was initiated by addition of 1×10⁻⁸ molar (¹²⁵I)-nBoNT B to the upper chamber. Cultures were subsequently incubated for eighteen hours at 37° C. At the end of each experiment contents of the basal chamber were collected and gel filtered. Void volume fractions were assayed for radioactivity and the toxin peak was summed to determine total counts. The amount of transcytosis was calculated based on the specific activity of labeled nBoNT B.

[0382] The results show that purified and nicked neurotoxin was transported from the apical to the basolateral side of cells. Purified neurotoxin efficiently crossed T-84 cells at a rate of 6.57±0.07 femtomoles per hour per square centimeter.

[0383] Several conclusions may be drawn. First, the purified, nBoNT B is bound, internalized, transcytosed, and released by differentiated, polarized human gut epithelial cells. Second, modification of lysine residues does not alter the ability of the holotoxin to display these properties. Third, the nBoNT B is capable of transporting the ¹²⁵I-Bolton-Hunter reagent from the apical to the basolateral side of human gut epithelial cells. Fourth, the HC of nBoNT B is capable of transporting more than one molecule (LC & Bolton-Hunter reagent) at a time across human gut epithelial cells.

### Example 12

### Apical to Basolateral Transcytosis of Nicked Botulinum Neurotoxin Serotype B in MDCK Cells

[0384] Transcytosis of nBoNT B linked to ¹²⁵I at lysine residues was assayed in Madin-Darby Canine Kidney (“MDCK”) cell cultures using a TRANSWELL® apparatus assay system. Assay was initiated by addition of 1×10⁻⁸ molar (¹²⁵I)-nBoNT B to the upper chamber. Cultures were subsequently incubated for eighteen hours at 37° C. At the end of each experiment, contents of the basal chamber were collected and gel filtered. Void volume fractions were assayed for radioactivity and the toxin peak was summed to determine total counts. The amount of transcytosis was calculated based on the specific activity of labeled nBoNT.

[0385] The results show that purified nBoNT was poorly transported from the apical to the basolateral side of cells. Purified nBoNT did not efficiently cross MDCK cells (0.05±0.00 femtomoles per hour per square centimeter).

[0386] The purified nBoNT B is poorly bound, internalized, transcytosed, and released by polarized MDCK cells.

### Example 13

### Basolateral to Apical Transcytosis of Nicked Botulinum Neurotoxin Serotype B in t-84 Cells

[0387] Transcytosis of nBoNT B linked to ¹²⁵I at the lysine residues was assayed in human gut epithelial (“T-84”) cell cultures using a TRANSWELL® apparatus assay system. Assay was initiated by addition of 1×10⁻⁸ molar (¹²⁵I)-nBoNT B to the lower chamber. Cultures were subsequently incubated for eighteen hours at 37° C. At the end of each experiment contents of the apical chamber were collected and gel filtered. Void volume fractions were assayed for radioactivity and the toxin peak was summed to determine total counts. The amount of transcytosis was calculated based on the specific activity of labeled nBoNT B.

[0388] The results show that nBoNT was transported from the basolateral to the apical side of cells. Purified nBoNT efficiently crossed T-84 cells at a rate of 5.54±0.00 femtomoles per hour per square centimeter.

[0389] Several conclusions may be drawn. First, the purified nBoNT B is bound, internalized, transcytosed, and released by differentiated, polarized human gut epithelial cells. Second, modification of lysine residues does not alter the ability of the nBoNT B to display these properties. Third, nBoNT B is capable of transporting the ¹²⁵I-Bolton-Hunter reagent from the basolateral to the apical side of human gut epithelial cells. Fourth, the HC of nBoNT B is capable of transporting more than one molecule (LC & Bolton-Hunter reagent) at a time across human gut epithelial cells.

### Example 14

### Basolateral to Apical Transcytosis of Nicked Botulinum Neurotoxin Serotype B in MDCK Cells

[0390] Transcytosis of nBoNT B linked to ¹²⁵I at lysine residues was assayed in Madin-Darby Canine Kidney (“MDCK”) cell cultures using a TRANSWELL® apparatus assay system. Assay was initiated by addition of 1×10⁻⁸ molar (¹²⁵I)-BoNT B to the lower chamber. Cultures were subsequently incubated for eighteen hours at 37° C. At the end of each experiment, contents of the apical chamber were collected and gel filtered. Void volume fractions were assayed for radioactivity and the toxin peak was summed to determine total counts. The amount of transcytosis was calculated based on the specific activity of labeled nBoNT.

[0391] The results show that purified nBoNT B was poorly transported from the basolateral to the apical side of cells. Purified nBoNT B did not efficiently cross MDCK cells (0.05±0.00 femtomoles per hour per square centimeter). The purified nBoNT B is poorly bound, internalized, transcytosed, and released by polarized MDCK epithelial cells.

### Example 15

### Western Blot of Apical to Basolateral Transcytosed HC in T-84 Cells

[0392] Transcytosis of HC, serotype A, was assayed in human gut epithelial (“T-84”) cell cultures using a TRANSWELL® apparatus assay system. Assay was initiated by addition of 1×10⁻⁸ molar HC to the upper chamber. Cultures were subsequently incubated for eighteen hours at 37° C. At the end of each experiment, contents of three basal chambers per condition were collected and concentrated in a CENTRICON™ micro-concentrator. The resulting solution was run on 7.5% (w/v) SDS-PAGE and subsequently transferred to nitrocellulose membranes. The identity and molecular weight of the transcytosed molecule was confirmed by Western blotting with anti-HC antibody.

[0393] The results verify that the HC was transported from the apical to the basolateral side of cells. Not only did HC efficiently cross T-84 cells, but the molecular weight of the molecule was unaltered.

[0394] There are two major conclusions that stem from the experimental results. First, the HC of botulinum neurotoxin is bound, internalized, transcytosed, and released by differentiated, polarized human gut epithelial cells. Second, after transcytosis, the molecular size of the native HC released on the basolateral side remains unchanged, leading to the conclusion that the process of transcytosis does not alter the physical structure of the HC.

### Example 16

### Western Blot of Apical to Basolateral Transcytosed HC in MDCK Cells

[0395] Transcytosis of HC, serotype A, was assayed in Madin-Darby Canine Kidney (“MDCK”) cell cultures using a TRANSWELL® apparatus assay system. Assay was initiated by addition of 1×10⁻⁸ molar HC to the upper chamber. Cultures were subsequently incubated for eighteen hours at 37° C. At the end of each experiment, contents of three basal chambers per condition were collected and concentrated in a CENTRICON™ micro-concentrator. The resulting solution was run on 7.5% (w/v) SDS-PAGE and subsequently transferred to nitrocellulose membranes. The identity and molecular weight of the transcytosed molecule was confirmed by Western blotting with anti-HC antibody.

[0396] The results show that the HC was not detected in medium collected from the basolateral side of cells. Thus, HC did not efficiently cross MDCK cells. The HC of botulinum neurotoxin is poorly bound, internalized, transcytosed, and released by polarized MDCK cells.

### Example 17

### Apical to Basolateral Transcytosis of HC in T-84 Cells

[0397] Transcytosis of HC, serotype A, linked to ¹²⁵I at lysine residues was assayed in human gut epithelial (“T-84”) cell cultures using a TRANSWELL® apparatus assay system. Assay was initiated by addition of 1×10⁻⁸ molar (¹²⁵I)HC to the upper chamber. Cultures were subsequently incubated for eighteen hours at 37° C. At the end of each experiment, contents of the basal chamber were collected and gel filtered. Void volume fractions were assayed for radioactivity and the toxin peak was summed to determine total counts. The amount of transcytosis was calculated based on the specific activity of labeled HC.

[0398] The results show that the HC was transported from the apical to the basolateral side of cells. Not only did HC efficiently cross T-84 cells, but the rate of transcytosis (7.10±0.00 femtomoles per hour per square centimeter) was comparable to the rate of transcytosis (11.34 femtomoles per hour per square centimeter) for purified BoNT A.

[0399] There are three major conclusions that may be drawn. First, the HC, serotype A, is bound, internalized, transcytosed, and released by differentiated, polarized human gut epithelial cells. Second, modification of lysine residues does not alter the ability of the HC to display these properties. Third, the HC is capable of transporting the ¹²⁵I-Bolton-Hunter reagent from the apical to the basolateral side of human gut epithelial cells.

### Example 18

### Apical to Basolateral Transcytosis of BoNT A HC in MDCK Cells

[0400] Transcytosis of HC, serotype A, linked to ¹²⁵I at lysine residues was assayed in Madin-Darby Canine Kidney (“MDCK”) cell cultures using a TRANSWELL® apparatus assay system. Assay was initiated by addition of 1×10⁻⁸ molar (¹²⁵I)-HC to the upper chamber. Cultures were subsequently incubated for eighteen hours at 37° C. At the end of each experiment, contents of the basal chamber were collected and gel filtered. Void volume fractions were assayed for radioactivity and the toxin peak was summed to determine total counts. The amount of transcytosis was calculated based on the specific activity of labeled HC.

[0401] The results show that the HC was poorly transported from the apical to the basolateral side of cells. HC did not efficiently cross MDCK cells, as evidenced by the rate of transcytosis of 0.06±0.00 femtomoles per hour per square centimeter. The HC, serotype A, is poorly bound, internalized, transcytosed, and released by polarized kidney epithelial cells.

### Example 19

### Western Blot of Apical to Basolateral Transcytosed 66 kHC in T-84 Cells

[0402] Transcytosis of 66 kHC, serotype A, was assayed in human gut epithelial (“T-84”) cell cultures using a TRANSWELL® apparatus assay system. Assay was initiated by addition of 1×10⁻⁸ molar 66 kHC to the upper chamber. Cultures were subsequently incubated for eighteen hours at 37° C. At the end of each experiment, contents of three basal chambers per condition were collected and concentrated in a CENTRICON™ micro-concentrator. The resulting solution was run on 7.5% (w/v) SDS-PAGE and subsequently transferred to nitrocellulose membranes. The identity and molecular weight of the transcytosed molecule was confirmed by Western blotting with anti-HC antibody.

[0403] The results verify that 66 kHC was transported from the apical to the basolateral side of cells. Not only did 66 kHC efficiently cross T-84 cells, but the molecular weight of the molecule was unaltered.

[0404] There are three major conclusions that may be drawn from these results, as follows: First, 66 kHC is bound, internalized, transcytosed, and released by differentiated, polarized human gut epithelial cells. Second, after transcytosis, the molecular size of 66 kHC released on the basolateral side remains unchanged. Third, 66 kHC is capable of transporting a 6×-histidine tag from the apical to the basolateral side of human gut epithelial cells.

### Example 20

### Western Blot of Apical to Basolateral Transcytosed 66 kHC in MDCK Cells

[0405] Transcytosis of 66 kHC, serotype A, was assayed in Madin-Darby Canine Kidney (“MDCK”) cell cultures using a TRANSWELL® apparatus assay system. Assay was initiated by addition of 1×10⁻⁸ molar 66 kHC to the upper chamber. Cultures were subsequently incubated for eighteen hours at 37° C. At the end of each experiment, contents of three basal chambers per condition were collected and concentrated in a CENTRICON™ micro-concentrator. The resulting solution was run on 7.5% (w/v) SDS-PAGE and subsequently transferred to nitrocellulose membranes. The identity and molecular weight of the transcytosed molecule was confirmed by Western blotting with anti-HC antibody.

[0406] The results show that 66 kHC was not detected in medium collected from the basolateral side of cells. Thus, 66 kHC did not efficiently cross MDCK cells. 66 kHC is poorly bound, internalized, transcytosed, and released by polarized MDCK cells.

### Example 21

### Western Blot of Apical to Basolateral Transcytosed 50 kHC in T-84 Cells

[0407] Transcytosis of 50 kHC, serotype A, was assayed in human gut epithelial (“T-84”) cell cultures using a TRANSWELL® apparatus assay system. Assay was initiated by addition of 1×10⁻⁸ molar 50 kHC to the upper chamber. Cultures were subsequently incubated for eighteen hours at 37° C. At the end of each experiment, contents of three basal chambers per condition were collected and concentrated in a CENTRICON™ micro-concentrator. The resulting solution was run on 7.5% (w/v) SDS-PAGE and subsequently transferred to nitrocellulose membranes. The identity and molecular weight of the transcytosed molecule was confirmed by Western blotting with anti-HC antibody.

[0408] The results verify that the 50 kHC fragment was transported from the apical to the basolateral side of cells. Not only did 50 kHC efficiently cross T-84 cells, but the molecular weight of the molecule was unaltered.

[0409] There are three major conclusions that may be drawn from the experimental results. First, 50 kHC is bound, internalized, transcytosed, and released by differentiated, polarized human gut epithelial cells. Second, after transcytosis, the molecular size of the 50 kHC fragment released on the basolateral side remains unchanged. Third, the 50 kHC fragment is capable of transporting a 6×-histidine tag from the apical to the basolateral side of human gut epithelial cells.

### Example 22

### Western Blot of Apical to Basolateral Transcytosed 50 kHC in MDCK Cells

[0410] Transcytosis of 50 kHC, serotype A, was assayed in Madin-Darby Canine Kidney (“MDCK”) cell cultures using a TRANSWELL® apparatus assay system. Assay was initiated by addition of 1×10⁻⁸ molar 50 kHC to the upper chamber. Cultures were subsequently incubated for eighteen hours at 37° C. At the end of each experiment, contents of three basal chambers per condition were collected and concentrated in a CENTRICON™ micro-concentrator. The resulting solution was run on 7.5% (w/v) SDS-PAGE and subsequently transferred to nitrocellulose membranes. The identity and molecular weight of the transcytosed molecule was confirmed by Western blotting with anti-HC antibody.

[0411] The results show that 50 kHC was not detected in medium collected from the basolateral side of cells. Thus, 50 kHC did not efficiently cross MDCK cells. Thus, 50 kHC of botulinum neurotoxin is poorly bound, internalized, transcytosed, and released by polarized MDCK cells.

### Example 23

### Apical to Basolateral Transcytosis of 50 kHC in T-84 Cells

[0412] Transcytosis of 50 kHC, serotype A, linked to ¹²⁵I at lysine residues was assayed in human gut epithelial (“T-84”) cell cultures using a TRANSWELL® apparatus assay system. Assay was initiated by addition of 1×10⁻⁸ molar (¹²⁵I)-50 kHC to the upper chamber. Cultures were subsequently incubated for eighteen hours at 37° C. At the end of each experiment, contents of the basal chamber were collected and gel filtered. Void volume fractions were assayed for radioactivity and the toxin peak was summed to determine total counts. The amount of transcytosis was calculated based on the specific activity of labeled 50 kHC.

[0413] The results show that 50 kHC was transported from the apical to the basolateral side of cells. Not only did 50 kHC efficiently cross T-84 cells, but the rate of transcytosis (13.97±0.00 femtomoles per hour per square centimeter) was comparable to the rate of transcytosis (11.34 femtomoles per hour per square centimeter) for purified BoNT A.

[0414] There are five major conclusions that may be drawn from the experimental results. First, the 50 kHC fragment of botulinum neurotoxin is bound, internalized, transcytosed, and released by differentiated, polarized human gut epithelial cells. Second, modification of lysine residues does not alter the ability of the 50 kHC fragment to display these properties. Third, 50 kHC is capable of transporting the ¹²⁵I-Bolton-Hunter reagent from the apical to the basolateral side of human gut epithelial cells. Fourth, the 50 kHC fragment is capable of transporting a 6×-histidine tag from the apical to the basolateral side of human gut epithelial cells. Fifth, the 50 kHC fragment is capable of transporting more than one molecule (polyhistidine tag & Bolton-Hunter reagent) at a time across human gut epithelial cells.

### Example 24

### Apical to Basolateral Transcytosis of 50 kHC in MDCK Cells

[0415] Transcytosis of 50 kHC, serotype A, linked to ¹²⁵I at lysine residues was assayed in Madin-Darby Canine Kidney (“MDCK”) cell cultures using a TRANSWELL® apparatus assay system. Assay was initiated by addition of 1×10⁻⁸ molar (¹²⁵I)-50 kHC to the upper chamber. Cultures were subsequently incubated for eighteen hours at 37° C. At the end of each experiment, contents of the basal chamber were collected and gel filtered. Void volume fractions were assayed for radioactivity and the toxin peak was summed to determine total counts. The amount of transcytosis was calculated based on the specific activity of labeled 50 kHC.

[0416] The results show that 50 kHC was poorly transported from the apical to the basolateral side of cells. 50 kHC did not efficiently cross MDCK cells, as evidenced by the rate of transcytosis of 0.06±0.00 femtomoles per hour per square centimeter. Thus, 50 kHC fragment of botulinum neurotoxin is poorly bound, internalized, transcytosed, and released by polarized MDCK epithelial cells.

### Example 25

### Apical to Basolateral Transcytosis of ALEXA FLUOR®-568 BoNT A in T-84 Cells

[0417] Transcytosis of ALEXA FLUOR® 568 BoNT A linked to ¹²⁵I at lysine residues was assayed in human gut epithelial (“T-84”) cell cultures using a TRANSWELL® apparatus assay system. Assay was initiated by addition of 1×10⁻⁸ molar ALEXA FLUOR® 568-BoNT A to the upper chamber. Cultures were subsequently incubated for eighteen hours at 37° C. At the end of each experiment contents of the basal chamber were collected and analyzed by fluorescence spectrometry. The relative amount of transcytosis was demonstrated based on the emission peak of the ALEXA FLUOR® 568 BoNT A conjugate.

[0418] The results show that purified BoNT A transported the small molecule from the apical to the basolateral side of cells. Purified BoNT A efficiently crossed T-84 cells, and the small molecule was co-transported.

[0419] There are three major conclusions that stem from the experimental results. First, the purified BoNT A is bound, internalized, transcytosed, and released by differentiated, polarized human gut epithelial cells. Second, modification of lysine residues does not alter the ability of the holotoxin to display these properties. Third, the BoNT A is capable of transporting the ALEXA FLUOR® 568 from the apical to the basolateral side of human gut epithelial cells.

### Example 26

### Apical to Basolateral Transcytosis of ALEXA FLUOR® 568 BoNT A in MDCK Cells

[0420] Transcytosis of ALEXA FLUOR® 568 BoNT A linked to ¹²⁵I at lysine residues was assayed in Madin-Darby Canine Kidney (“MDCK”) cell cultures using a TRANSWELL® apparatus assay system. Assay was initiated by addition of 1×10⁻⁸ molar ALEXA FLUOR® 568-BoNT A to the upper chamber. Cultures were subsequently incubated for eighteen hours at 37° C. At the end of each experiment contents of the basal chamber were collected and analyzed by fluorescence spectrometry. The relative amount of transcytosis was demonstrated based on the emission peak of the ALEXA FLUOR® 568-labeled BoNT A conjugate.

[0421] The results show that purified BoNT A did not efficiently transport the small molecule from the apical to the basolateral side of cells. Purified BoNT A did not efficiently co-transport the small molecule in MDCK cell cultures. The purified BoNT A is poorly bound, internalized, transcytosed, and released by differentiated, polarized canine kidney epithelial cells and therefore, incapable of transporting a small molecule across these cells.

### Example 27

### Apical to Basolateral Transcytosis of Biotin-50 kHC in T-84 Cells

[0422] Transcytosis of biotin-50 kHC, serotype A, was assayed in human gut epithelial (“T-84”) cell cultures using a TRANSWELL® apparatus assay system. Assay was initiated by addition of 1×10⁻⁷ molar biotin-50 kHC to the upper chamber. Cultures were subsequently incubated for eighteen hours at 37° C. At the end of each experiment, contents of three basal chambers per condition were collected and concentrated in a CENTRICON™ micro-concentrator. The resulting solution was run on 7.5% (w/v) SDS-PAGE and subsequently transferred to nitrocellulose membranes. The identity and molecular weight of the transcytosed molecule was confirmed by Western blotting with anti-HC antibody and by probing a duplicate blot with avidin-HRP.

[0423] The results verify that biotin-50 kHC was transported from the apical to the basolateral side of cells. Not only did biotin-50 kHC efficiently cross T-84 cells, but the molecular weight and receptor binding properties of the molecule were unaltered.

[0424] There are six conclusions that can be drawn. First, biotin-50 kHC is bound, internalized, transcytosed, and released by differentiated, polarized human gut epithelial cells. Second, modification of the fragment by addition of biotin does not alter the ability of the 50 kHC fragment to display these properties. Third, the 50 kHC fragment is capable of transporting biotin from the apical to the basolateral side of human gut epithelial cells. Fourth, the transported biotin molecule retains its ligand binding properties and associates with avidin. Fifth, the 50 kHC fragment is capable of transporting a 6×-histidine tag from the apical to the basolateral side of human gut epithelial cells. Sixth, the 50 kHC fragment is capable of transporting more than one molecule (polyhistidine tag and biotin) at a time across human gut epithelial cells.

### Example 28

### Apical to Basolateral Transcytosis of Biotin-50 kHC in MDCK Cells

[0425] Transcytosis of biotin-50 kHC, serotype A, was assayed in Madin-Darby Canine Kidney (“MDCK”) cell cultures using a TRANSWELL® apparatus assay system. Assay was initiated by addition of 1×10⁻⁷ molar biotin-50 kHC to the upper chamber. Cultures were subsequently incubated for eighteen hours at 37° C. At the end of each experiment, contents of three basal chambers per condition were collected and concentrated in a CENTRICON™ micro-concentrator. The resulting solution was run on 7.5% (w/v) SDS-PAGE and subsequently transferred to nitrocellulose membranes. The identity and molecular weight of the transcytosed molecule was confirmed by Western blotting with anti-HC antibody and by probing a duplicate blot with avidin-HRP.

[0426] The results verify that biotin-50 kHC was not efficiently transported from the apical to the basolateral side of cells. Purified 50 kHC did not efficiently co-transport 244 dalton biotin molecule in MDCK cultures.

[0427] There are two conclusions that stem from the experimental results. First, the biotin-50 kHC is not bound, internalized, transcytosed, and released by differentiated, polarized canine kidney epithelial cells. Second, the 50 kHC is not capable of transporting biotin from the apical to the basolateral side of canine kidney epithelial cells.

### Example 29

### Apical to Basolateral Transcytosis of Green Fluorescent Protein-66 kHC T-84 Cells

[0428] Transcytosis of green fluorescent protein-66 kHC, serotype A, was assayed in human gut epithelial (“T-84”) cell cultures using a TRANSWELL® apparatus assay system. Assay was initiated by addition of 1×10⁻⁸ molar GFP-66 kHC to the upper chamber. Cultures were subsequently incubated for eighteen hours at 37° C. At the end of each experiment, contents of the basal chamber were collected and analyzed by fluorescence spectrometry. The relative amount of transcytosis was demonstrated based upon the emission peak of the GFP-66 kHC conjugate.

[0429] The results show that 66 kHC transported the green fluorescent protein-66 kHC from the apical to the basolateral side of cells. Purified fragment efficiently crossed T-84 cells, and the green fluorescent protein-66 kHC was co-transported.

[0430] There are four [six ??] conclusions that can be drawn. First, 66 kHC is bound, internalized, transcytosed, and released by differentiated, polarized human gut epithelial cells. Second, modification of 66 kHC by addition of GFP does not alter the ability of 66 kHC to display these properties. Third, 66 kHC is capable of transporting GFP from the apical to the basolateral side of human gut epithelial cells. Fourth, the transported GFP molecule retains its fluorescence emitting properties. Fifth, 66 kHC is capable of transporting a 6×-histidine tag from the apical to the basolateral side of human gut epithelial cells. Sixth, 66 kHC is capable of transporting more than one molecule simultaneously (polyhistidine tag and GFP) across human gut epithelial cells.

### Example 30

### Apical to Basolateral Transcytosis of Green Fluorescent Protein-66 kHC in MDCK Cells

[0431] Transcytosis of green fluorescent protein-66 kHC was assayed in Madin-Darby Canine Kidney (“MDCK”) cell cultures using a TRANSWELL® apparatus assay system. Assay was initiated by addition of 1×10⁻⁸ molar GFP-66 kHC to the upper chamber. Cultures were subsequently incubated for eighteen hours at 37° C. At the end of each experiment, contents of the basal chamber were collected and analyzed by fluorescence spectrometry. The relative amount of transcytosis was demonstrated based upon the emission peak of the GFP-66 kHC conjugate.

[0432] The results show that 66 kHC did not efficiently transport GFP from the apical to the basolateral side of cells. Purified 66 kHC fragment did not efficiently transport the GFP in MDCK cell cultures. 66 kHC is poorly bound, internalized, transcytosed, and released by differentiated, polarized canine kidney epithelial cells.

### Example 31

### Apical to Basolateral Transcytosis of S-TAG™-50 kHC in T-84 Cells

[0433] Transcytosis of S-TAG™ 50 kHC, serotype A, was assayed in human gut epithelial (“T-84”) cell cultures using a TRANSWELL® apparatus assay system. Assay was initiated by addition of 1×10⁻⁸ molar S-TAG™-50 kHC to the upper chamber. Cultures were subsequently incubated for eighteen hours at 37° C. At the end of each experiment, contents of three basal chambers per condition were collected and concentrated in a CENTRICON™ micro-concentrator. The resulting solution was run on 7.5% (w/v) SDS-PAGE and subsequently transferred to nitrocellulose membranes. The identity and molecular weight of the transcytosed molecule was confirmed by Western blotting with anti-HC antibody.

[0434] The results verify that the S-TAG™-50 kHC was transported from the apical to the basolateral side of cells. Not only did S-TAG™-50 kHC efficiently cross T-84 cells, but the molecular weight of the molecule was unaltered.

[0435] There are six conclusions that may be drawn. First, S-TAG™-50 kHC is bound, internalized, transcytosed, and released by differentiated, polarized human gut epithelial cells. Second, modification of 50 kHC by addition of S-TAG™ does not alter the ability of 50 kHC to exhibit these properties. Third, 50 kHC is capable of transporting S-TAG™ from the apical to the basolateral side of human gut epithelial cells. Fourth, the transported S-TAG™ molecule retains its antibody binding properties. Fifth, 50 kHC is capable of transporting a 6×-histidine tag from the apical to the basolateral side of human gut epithelial cells. Sixth, 50 kHC is capable of transporting more than one molecule (polyhistidine tag and S-TAG™) at a time across human gut epithelial cells.

### Example 32

### Apical to Basolateral Transcytosis of an S-TAG™-50 kHC in MDCK Cells

[0436] Transcytosis of S-TAG™-50 kHC, serotype A, was assayed in Madin-Darby Canine Kidney (“MDCK”) cell cultures using a TRANSWELL® apparatus assay system. Assay was initiated by addition of 1×10⁻⁸ molar S-TAG™-50 kHC to the upper chamber. Cultures were subsequently incubated for eighteen hours at 37° C. At the end of each experiment, contents of three basal chambers per condition were collected and concentrated in a CENTRICON™ micro-concentrator. The resulting solution was run on 7.5% (w/v) SDS-PAGE and subsequently transferred to nitrocellulose membranes. The identity and molecular weight of the transcytosed molecule was confirmed by Western blotting with anti-HC antibody.

[0437] The results show that S-TAG™-50 kHC was not detected in medium collected from the basolateral side of cells. Thus, the S-TAG™-50 kHC did not efficiently cross MDCK cells. The S-TAG™-50 kHC is poorly bound, internalized, transcytosed, and released by polarized MDCK cells.

### Example 33

### Apical to Basolateral Transcytosis of Glutathione-S-Transferase (GST)-88 kHC Conjugate in T-84 Cells

[0438] Transcytosis of GST-88 kHC, serotype A, was assayed in human gut epithelial (“T-84”) cell cultures using a TRANSWELL® apparatus assay system. Assay was initiated by addition of 1×10⁻⁸ molar GST-88 kHC to the upper chamber. Cultures were subsequently incubated for eighteen hours at 37° C. At the end of each experiment, contents of three basal chambers per condition were collected and concentrated in a CENTRICON™ micro-concentrator. The resulting solution was run on 7.5% (w/v) SDS-PAGE and subsequently transferred to nitrocellulose membranes. The identity and molecular weight of the transcytosed molecule was confirmed by Western blotting with anti-HC antibody and by probing a duplicate blot with anti-GST antibody.

[0439] The results verify that the GST-88 kHC was transported from the apical to the basolateral side of cells. Not only did the GST-88 kHC efficiently cross T-84 cells, but the molecular weight of the molecule was unaltered.

[0440] There are six major conclusions that stem from the experimental results. The GST-88 kHC is bound, internalized, transcytosed, and released by differentiated, polarized human gut epithelial cells. Second, modification of 88 kHC by addition of GST does not alter the ability of 88 kHC to display these properties. Third, 99 kHC is capable of transporting GST from the apical to the basolateral side of human gut epithelial cells. Fourth, the transported GST molecule retains its enzymatic properties. Fifth, 88 kHC is capable of transporting a 6×-histidine tag from the apical to the basolateral side of human gut epithelial cells. Sixth, 88 kHC is capable of transporting more than one molecule (polyhistidine tag and GST) at a time across human gut epithelial cells.

### Example 34

### Apical to Basolateral Transcytosis of GST-88 kHC in MDCK Cells

[0441] Transcytosis of GST-88 kHC, serotype A, was assayed in MDCK cell cultures using a TRANSWELL® apparatus assay system. Assay was initiated by addition of 1×10⁻⁸ molar GST-88 kHC to the upper chamber. Cultures were subsequently incubated for eighteen hours at 37° C. At the end of each experiment, contents of three basal chambers per condition were collected and concentrated in a CENTRICON™ micro-concentrator. The resulting solution was run on 7.5% (w/v) SDS-PAGE and subsequently transferred to nitrocellulose membranes. The identity and molecular weight of the transcytosed molecule was confirmed by Western blotting with anti-HC antibody and by probing a duplicate blot with anti-GST antibody. The results demonstrate that the GST-88 kHC was not efficiently transported from the apical to the basolateral side of cells.

### Example 35

### Apical to Basolateral Transcytosis of GST-66 kHC in T-84 Cells

[0442] Transcytosis of GST-66 kHC, serotype A, was assayed in human gut epithelial (“T-84”) cell cultures using a TRANSWELL® apparatus assay system. Assay was initiated by addition of 1×10⁻⁸ molar GST-66 kHC to the upper chamber. Cultures were subsequently incubated for eighteen hours at 37° C. At the end of each experiment, contents of three basal chambers per condition were collected and concentrated in a CENTRICON™ micro-concentrator. The resulting solution was run on 7.5% (w/v) SDS-PAGE and subsequently transferred to nitrocellulose membranes. The identity and molecular weight of the transcytosed molecule was confirmed by Western blotting with anti-HC antibody and by probing a duplicate blot with anti-GST antibody.

[0443] The results verify that GST-66 kHC was transported from the apical to the basolateral side of cells. Not only did GST-66 kHC efficiently cross T-84 cells, but the molecular weight of the molecule was unaltered.

[0444] There are six conclusions that may be drawn from the experimental results. First, GST-66 kHC is bound, internalized, transcytosed, and released by differentiated, polarized human gut epithelial cells. Second, modification of the 66 kHC by addition of GST does not alter the ability of 66 kHC to display these properties. Third, 66 kHC is capable of transporting GST from the apical to the basolateral side of human gut epithelial cells. Fourth, the transported GST molecule retains its enzymatic properties. Fifth, 66 kHC is capable of transporting a 6×-histidine tag from the apical to the basolateral side of human gut epithelial cells. Sixth, 66 kHC is capable of transporting more than one molecule (polyhistidine tag and GST) at a time across human gut epithelial cells.

### Example 36

### Apical to Basolateral Transcytosis of GST-66 kHC in MDCK Cells

[0445] Transcytosis of GST-66 kHC, serotype A, was assayed in MDCK cell cultures using a TRANSWELL® apparatus assay system. Assay was initiated by addition of 1×10⁻⁸ molar GST-66 kHC to the upper chamber. Cultures were subsequently incubated for eighteen hours at 37° C. At the end of each experiment, contents of three basal chambers per condition were collected and concentrated in a CENTRICON™ micro-concentrator. The resulting solution was run on 7.5% (w/v) SDS-PAGE and subsequently transferred to nitrocellulose membranes. The identity and molecular weight of the transcytosed molecule was confirmed by Western blotting with anti-HC antibody and by probing a duplicate blot with anti-GST antibody.

[0446] The results demonstrate that GST-66 kHC was not efficiently transported from the apical to the basolateral side of cells. Purified GST-66 kHC did not efficiently cross MDCK cultures. The GST-66 kHC is poorly bound, internalized, transcytosed, and released by polarized canine kidney epithelial cells.

### Example 37

### Apical to Basolateral Transcytosis of BoNT A by Calu-3 Cells

[0447] Transcytosis was assayed in Calu-3 cell cultures using a TRANSWELL® apparatus assay system. Assay was initiated by addition of 1×10⁻⁸ molar (1251)-BoNT A to the upper chamber. Cultures were subsequently incubated for eighteen hours at 37° C. At each time point, the experimental contents of the basal chamber were collected and gel filtered. Void volume fractions were assayed for radioactivity and the toxin peak was summed to determine total counts. The amount of transcytosis was calculated based on the specific activity of labeled toxin.

[0448] The results show that BoNT A was transported from the apical to the basolateral side of cells. Purified neurotoxin efficiently crossed Calu-3 cells, and the rate of transcytosis was quantified at 0.423±0.076 femtomoles per hour per square centimeter.

[0449] There are five major conclusions that stem from the experimental results. First, the purified botulinum neurotoxin is bound, internalized, transcytosed, and released by differentiated, polarized human alveolar epithelial cells. Second, modification of lysine residues does not alter the ability of the holotoxin to display these properties. Third, the holotoxin is capable of transporting the ¹²⁵I-Bolton-Hunter reagent from the apical to the basolateral side of human alveolar epithelial cells. Fourth, the HC is capable of transporting the LC from the apical to the basolateral side of human alveolar epithelial cells. Fifth, the HC is capable of transporting more than one molecule (LC & Bolton-Hunter reagent) at a time across human alveolar epithelial cells.

### Example 38

### Basolateral to Apical Transcytosis of BoNT A by Calu-3 Cells

[0450] Transcytosis was assayed in Calu-3 cell cultures using a TRANSWELL® apparatus assay system. Assay was initiated by addition of 1×10⁻⁸ molar (¹²⁵I)-BoNT A to the lower chamber. Cultures were subsequently incubated for eighteen hours at 37° C. At each time point, the experimental contents of the upper chamber were collected and gel filtered. Void volume fractions were assayed for radioactivity and the toxin peak was summed to determine total counts. The amount of transcytosis was calculated based on the specific activity of labeled BoNT A.

[0451] The results show that BoNT A was transported from the basolateral to the apical side of cells. Purified neurotoxin efficiently crossed Calu-3 cells, and the rate of transcytosis was quantified at 0.206±0.037 femtomoles per hour per square centimeter.

[0452] There are five major conclusions that stem from the experimental results. First, the purified botulinum neurotoxin is bound, internalized, transcytosed, and released by differentiated, polarized human alveolar epithelial cells. This process is somewhat less efficient in the basolateral to apical direction than in the reverse direction. Second, modification of lysine residues does not alter the ability of the holotoxin to display these properties. Third, the holotoxin is capable of transporting the ¹²⁵I-Bolton-Hunter reagent from the basolateral to the apical side of human gut epithelial cells. Fourth, the HC is capable of transporting the LC from the basolateral to the apical side of human gut epithelial cells. Fifth, the HC is capable of transporting more than one molecule (LC & Bolton-Hunter reagent) at a time across human alveolar epithelial cells.

### Example 39

### Apical to Basolateral Transcytosis of A HC by Calu-3 cells

[0453] Transcytosis was assayed in Calu-3 cell cultures using a TRANSWELL® apparatus assay system. Assay was initiated by addition of 1×10⁻⁸ molar (¹²⁵I)-HC (serotype A) to the upper chamber. Cultures were subsequently incubated for eighteen hours at 37° C. At each time point, the experimental contents of the basal chamber were collected and gel filtered. Void volume fractions were assayed for radioactivity and the toxin peak was summed to determine total counts. The amount of transcytosis was calculated based on the specific activity of labeled HC.

[0454] The results show that HC was transported from the apical to the basolateral side of cells. Not only did HC efficiently cross Calu-3 cells, but the rate of transcytosis (0.198±0.007 femtomoles per hour per square centimeter) was comparable to the rate of transcytosis (0.423 femtomoles per hour per square centimeter) for purified holotoxin.

[0455] There are three major conclusions that may be drawn. First, the HC fragment of botulinum neurotoxin is bound, internalized, transcytosed, and released by differentiated, polarized human alveolar epithelial cells. Second, modification of lysine residues does not alter the ability of the HC to display these properties. Third, the HC is capable of transporting the ¹²⁵I-Bolton-Hunter reagent from the apical to the basolateral side of human alveolar epithelial cells.

### Example 40

### Basolateral to Apical Transcytosis of HC by Calu-3 Cells

[0456] Transcytosis was assayed in Calu-3 cell cultures using a TRANSWELL® apparatus assay system. Assay was initiated by addition of 1×10⁻⁸ molar (¹²⁵I)-HC (serotype A) to the lower chamber. Cultures were subsequently incubated for eighteen hours at 37° C. At each time point, the experimental contents of the upper chamber were collected and gel filtered. Void volume fractions were assayed for radioactivity and the toxin peak was summed to determine total counts. The amount of transcytosis was calculated based on the specific activity of labeled HC.

[0457] The results show that HC was transported from the basolateral to the apical side of cells. Not only did HC efficiently cross Calu-3 cells, but the rate of transcytosis (0.112±0.033 femtomoles per hour per square centimeter) was comparable to the rate of transcytosis (0.206 femtomoles per hour per square centimeter) for purified holotoxin.

[0458] There are three major conclusions that may be drawn. First, the HC fragment of botulinum neurotoxin is bound, internalized, transcytosed, and released by differentiated, polarized human alveolar epithelial cells. This phenomenon operates in both the apical to basolateral and basolateral to apical directions, although the former is more efficient. Second, modification of lysine residues does not alter the ability of the HC to display these properties. Third, the HC is capable of transporting the ¹²⁵I-Bolton-Hunter reagent from the basolateral to the apical side of human alveolar epithelial cells.

### Example 41

### Apical to Basolateral Transcytosis of BoNT A by Rat Alveolar Epithelial Cells

[0459] Transcytosis was assayed in rat alveolar epithelial cells (RAEC) cultures using a TRANSWELL® apparatus assay system. Assay was initiated by addition of 1×10⁻⁸ molar (¹²⁵I)-BoNT A to the upper chamber. Cultures were subsequently incubated for eighteen hours at 37° C. At each time point, the experimental contents of the basal chamber were collected and gel filtered. Void volume fractions were assayed for radioactivity and the toxin peak was summed to determine total counts. The amount of transcytosis was calculated based on the specific activity of labeled BoNT A.

[0460] The results show that BoNT A was transported from the apical to the basolateral side of cells. Purified neurotoxin efficiently crossed rat alveolar epithelial cells, and the rate of transcytosis was quantified at 0.376±0.014 femtomoles per hour per square centimeter.

[0461] There are five major conclusions that stem from the experimental results. First, the purified botulinum neurotoxin is bound, internalized, transcytosed, and released by differentiated, polarized rat alveolar epithelial cells. Second, modification of lysine residues does not alter the ability of the holotoxin to display these properties. Third, the holotoxin is capable of transporting the ¹²⁵I-Bolton-Hunter reagent from the apical to the basolateral side of rat alveolar epithelial cells. Fourth, the HC is capable of transporting the LC from the apical to the basolateral side of rat alveolar epithelial cells. Fifth, the HC is capable of transporting more than one molecule (LC & Bolton-Hunter reagent) at a time across rat alveolar epithelial cells.

### Example 42

### Basolateral to Apical Transcytosis of BoNT A by RAEC

[0462] Transcytosis was assayed in rat alveolar epithelial cell cultures using a TRANSWELL® apparatus assay system. Assay was initiated by addition of 1×10⁻⁸ molar (¹²⁵I)-BoNT A to the lower chamber. Cultures were subsequently incubated for eighteen hours at 37° C. At each time point, the experimental contents of the upper chamber were collected and gel filtered. Void volume fractions were assayed for radioactivity and the toxin peak was summed to determine total counts. The amount of transcytosis was calculated based on the specific activity of labeled BoNT A.

[0463] The results show that BoNT A was transported from the basolateral to the apical side of cells. Purified neurotoxin efficiently crossed rat alveolar epithelial cells, and the rate of transcytosis was quantified at 0.159±0.027 femtomoles per hour per square centimeter.

[0464] There are five major conclusions that stem from the experimental results. First, the purified botulinum neurotoxin is bound, internalized, transcytosed, and released by differentiated, polarized rat alveolar epithelial cells. This phenomenon operates in both the apical to basolateral and basolateral to apical directions, although the former is more efficient. Second, modification of lysine residues does not alter the ability of the holotoxin to display these properties. Third, the holotoxin is capable of transporting the ¹²⁵I-Bolton-Hunter reagent from the basolateral to the apical side of rat alveolar epithelial cells. Fourth, the HC is capable of transporting the LC from the basolateral to the apical side of rat alveolar epithelial cells. Fifth, the HC is capable of transporting more than one molecule (LC & Bolton-Hunter reagent) at a time across rat alveolar epithelial cells.

### Example 43

### Apical to Basolateral Transcytosis of HC by RAEC

[0465] Transcytosis was assayed in rat alveolar epithelial cells (RAEC) using a TRANSWELL® apparatus assay system. Assay was initiated by addition of 1×10⁻⁸ molar (¹²⁵I)-HC (serotype A) to the upper chamber. Cultures were subsequently incubated for 18 hours at 37° C. At each time point, the experimental contents of the basal chamber were collected and gel filtered. Void volume fractions were assayed for radioactivity and the toxin peak was summed to determine total counts. The amount of transcytosis was calculated based on the specific activity of labeled HC.

[0466] The results show that HC was transported from the apical to the basolateral side of cells. Not only did HC efficiently cross rat alveolar epithelial cells, but the rate of transcytosis (0.140±0.050 femtomoles per hour per square centimeter) was comparable to the rate of transcytosis (0.376 femtomoles per hour per square centimeter) for botulinum neurotoxin type A.

[0467] There are three major conclusions that may be drawn. First, the HC fragment of botulinum neurotoxin is bound, internalized, transcytosed, and released by differentiated, polarized rat alveolar epithelial cells. Second, modification of lysine residues does not alter the ability of the HC to display these properties. Third, the HC is capable of transporting the ¹²⁵I-Bolton-Hunter reagent from the apical to the basolateral side of human alveolar epithelial cells.

### Example 44

### Basolateral to Apical Transcytosis of HC by RAEC

[0468] Transcytosis was assayed in rat alveolar epithelial cells using a TRANSWELL® apparatus assay system. Assay was initiated by addition of 1×10⁻⁸ molar (¹²⁵I)-HC (serotype A) to the lower chamber. Cultures were subsequently incubated for eighteen hours at 37° C. At each time point, the experimental contents of the upper chamber were collected and gel filtered. Void volume fractions were assayed for radioactivity and the toxin peak was summed to determine total counts. The amount of transcytosis was calculated based on the specific activity of labeled HC.

[0469] The results show that HC was transported from the basolateral to the apical side of cells. Not only did HC efficiently cross rat alveolar epithelial cells, but the rate of transcytosis (0.132±0.026 femtomoles per hour per square centimeter) was comparable to the rate of transcytosis (0.159 femtomoles per hour per square centimeter) for botulinum neurotoxin type A.

[0470] There are three major conclusions that may be drawn. First, the HC fragment of botulinum neurotoxin is bound, internalized, transcytosed, and released by differentiated, polarized rat alveolar epithelial cells. This phenomenon operates in both the apical to basolateral and Basolateral to apical directions, although the former is more efficient. Second, modification of lysine residues does not alter the ability of the HC to display these properties. Third, the HC is capable of transporting the ¹²⁵I-Bolton-Hunter reagent from the basolateral to the apical side of rat alveolar epithelial cells.

### Example 45

### Absorption of BoNT A from the Respiratory Tract of Mouse

[0471] This example demonstrated that botulinum toxin contains all information necessary to bind receptors on the apical surface of epithelial cells, to be internalized, to be transcytosed, and to be released on the basolateral side of epithelial cells in living animals. These experiments were done with homogeneous BoNT and with Swiss-Webster female mice (25 to 30 grams body weight).

[0472] BoNT A was administered by the intranasal route. After mice were lightly anesthetized with isoflurane (ISO-THESIA™, Abbott Laboratories North, Chicago, Ill.), 36.4 micrograms per kilogram weight (¹²⁵I)-BoNT A was administered by a single application of a 20 microliter solution to the nares. The heads of animals were maintained in an upright position to minimize drainage into the posterior pharynx. Individual groups were sacrificed at 1, 2, or 3 hours with CO₂, and blood was collected by cardiac puncture. Plasma was separated from blood by centrifugation at 3000×g for 10 minutes and then stored at −20° C. until assay. Plasma samples (100 microliters) were subsequently mixed with PBS (400 microliters) and filtered through a SEPHADEX™ G-25 column. Fractions (0.5 milliliter) were collected, and the amount of radioactivity in the fractions was measured in a gamma-counter. Labeled BoNT A eluted at void volume, and the radioactivity contained in the void volume fractions was summed to determine the total amount of protein present.

[0473] The results shown in FIG. 23 indicate that the botulinum toxin was absorbed from the respiratory tract. The timepoint for maximum protein concentration in blood was approximately two hours, and there was rapid clearance after attainment of the peak values.

[0474] There are five major conclusions that stem from the experimental results. First, the purified botulinum neurotoxin is bound, internalized, transcytosed, and released by respiratory tract epithelial cells in vivo. Second, modification of lysine residues does not alter the ability of the holotoxin to display these properties. Third, the holotoxin is capable of transporting the ¹²⁵I-Bolton-Hunter reagent from the apical to the basolateral side of mouse respiratory epithelial cells in vivo. Fourth, the HC is capable of transporting the LC from the apical to the basolateral side of mouse respiratory epithelial cells in vivo. Fifth, the HC is capable of transporting more than one molecule (LC & Bolton-Hunter reagent) at a time across mouse respiratory epithelial cells in vivo.

### Example 46

### Absorption of Native HC from the Respiratory Tract of Mouse

[0475] This example demonstrated that HC (serotype A) contains all information necessary to bind receptors on the apical surface of epithelial cells, to be internalized, to be transcytosed, and to be released on the basolateral side of epithelial cells in living animals. These experiments were done with homogeneously isolated HC of BoNT and with Swiss-Webster female mice (25 to 30 grams body weight).

[0476] HC was administered by the intranasal route. After mice were lightly anesthetized with isoflurane (ISO-THESIA™, Abbott Laboratories North, Chicago, Ill., U.S.A.), 24.4 micrograms per kilogram body weight (¹²⁵I)-HC was administered by a single application of a 20 microliter solution to the nares. The heads of animals were maintained in an upright position to minimize drainage into the posterior pharynx. Individual groups were sacrificed at one, two, four or six hours with CO₂, and blood was collected by cardiac puncture. Plasma was separated from blood by centrifugation at 3000×g for 10 minutes and then stored at −20° C. until assay. Plasma samples (100 microliters) were subsequently mixed with PBS (400 microliters) and filtered through a SEPHADEX™ G-25 column. Fractions (0.5 milliliter) were collected, and the amount of radioactivity in the fractions was measured in a gamma-counter. Labeled HC eluted at void volume, and the radioactivity contained in the void volume fractions was summed to determine the total amount of HC present.

[0477] Animals that received HC were monitored for 6 hours. The results shown in FIG. 24 indicate that HC was absorbed from the respiratory tract. The timepoint for maximum protein concentration in blood was approximately two hours, and there was rapid clearance after attainment of the peak values.

[0478] There are three major conclusions that may be drawn. First, the HC fragment of botulinum neurotoxin is bound, internalized, transcytosed, and released by respiratory tract epithelial cells in vivo. Second, modification of lysine residues does not alter the ability of the HC to display these properties. Third, the HC is capable of transporting the ¹²⁵I-Bolton-Hunter reagent from the apical to the basolateral side of mouse respiratory epithelial cells in vivo.

### Example 47

### Absorption of recombinant 50 kHC from the Respiratory Tract of Mouse

[0479] This example demonstrated that 50 kHC contains all information necessary to bind receptors on the apical surface of epithelial cells, to be internalized, to be transcytosed, and to be released on the basolateral side of epithelial cells in living animals. These experiments were done with purified recombinant 50 kHC fused with a 6×His tag and with Swiss-Webster female mice (body weight of 25 to 30 grams each).

[0480] 50 kHC was administered by the intranasal route. After mice were lightly anesthetized with isoflurane (ISO-THESIA™, Abbott Laboratories North, Chicago, Ill., U.S.A.), 0.4 milligrams of protein per kilogram body weight was administered by a single application of a 20 microliter solution to the nares. The heads of animals were maintained in an upright position to minimize drainage into the posterior pharynx. Individual groups were sacrificed at 0.5, 1, 2, or 4 hours with CO₂ and blood was collected by cardiac puncture. Plasma was separated from blood by centrifugation at 3000×g for 10 minutes and then stored at −20° C. until assay. Plasma level of the HC fragment was determined by capture ELISA.

[0481] Animals that received 50 kHC were monitored for four hours. The results shown in FIG. 25 that 50 kHC was absorbed from the respiratory tract. The timepoint for maximum protein concentration in blood was approximately one hour, and there was rapid clearance after attainment of peak values.

[0482] There are two major conclusions that stem from the experimental results. First, the 50 kHC fragment of botulinum neurotoxin is bound, internalized, transcytosed, and released by mouse respiratory tract epithelial cells in vivo. Second, 50 kHC is capable of transporting a 6×-histidine tag from the apical to the basolateral side of mouse respiratory tract epithelial cells in vivo.

### Example 48

### Absorption of GST-50 kHC from the Respiratory Tract of Mouse

[0483] This example demonstrated that 50 kHC contains all information necessary to bind receptors on the apical surface of epithelial cells, to be internalized, to be transcytosed, and to be released on the basolateral side of epithelial cells in living animals. In addition, 50 kHC can transport GST across epithelial cells. These experiments were done with purified recombinant GST-50 kHC and Swiss-Webster female mice (body weight of 25 to 30 grams each).

[0484] GST-50 kHC fusion protein was administered by the intranasal route. After mice were lightly anesthetized with isoflurane (ISO-THESIA™, Abbott Laboratories North, Chicago, Ill., U.S.A.), 0.6 micrograms per kilogram body weight protein was administered by a single application of a 20 microliter solution to the nares. The heads of animals were maintained in an upright position to minimize drainage into the posterior pharynx. Individual groups were sacrificed at one, two, four or six hours with CO₂, and blood was collected by cardiac puncture. Plasma was separated from blood by centrifugation at 3000×g for 10 minutes and then stored at −20° C. until assay. Plasma level of GST-50 kHC was determined by capture ELISA.

[0485] Animals that received GST-50 kHC were monitored for six hours. The results shown in FIG. 26 indicate that GST-50 kHC was absorbed from the respiratory tract. The timepoint for maximum protein concentration in blood was approximately two hours, and there was rapid clearance after attainment of the peak values.

[0486] There are four major conclusions that may be drawn from the experimental results. First, the GST-50 kHC is bound, internalized, transcytosed, and released by mouse respiratory tract epithelial cells in vivo. Second, 50 kHC is capable of transporting GST from the apical to the basolateral side of mouse respiratory tract epithelial cells in vivo. Third, 50 kHC is capable of transporting a 6×-histidine tag from the apical to the basolateral side of mouse respiratory tract epithelial cells in vivo. Fourth, 50 kHC is capable of transporting more than one molecule (GST & 6×-histidine tag) at a time across mouse respiratory epithelial cells in vivo.

### Example 49

### Intranasal Immunization of Mice with GST-50 kHC

[0487] This example demonstrated that 50 kHC contains all information necessary to bind receptors on the apical surface of epithelial cells, to be internalized, to be transcytosed, and to be released on the Basolateral side of epithelial cells in living animals. In addition, 50 kHC can transport a heterologous molecule in the correct conformation to evoke an immune response. These experiments were done with purified recombinant GST-50 kHC and Swiss-Webster female mice (body weight of 25-30 grams each).

[0488] For intranasal immunization, mice received 0.6 milligrams of GST-50 kHC per kilogram body weight in 20 microliters of PBS. Mice were lightly anesthetized with isoflurane (ISO-THESIA™, Abbott Laboratories North, Chicago, Ill., U.S.A.). Protein was administered by a single application of a 20 microliter solution to the nares. The heads of animals were maintained in an upright position to minimize drainage into the posterior pharynx. Five doses were given at seven day intervals. The mice were bled 10 days after the fifth immunization, and the specimens were analyzed by immunoblotting for immunoreactivity to GST, 50 kHC, and GST-50 kHC.

[0489] Animals that are immunized with GST-50 kHC were monitored for the presence of specific antibodies. The results shown in the Western blot of immunized mouse serum of FIG. 27 show that these animals developed antibodies against both GST and BoNT A HC following intranasal immunization with GST-50 kHC. These results indicate that 50 kHC carries GST molecule from the respiratory tract to the blood stream in vivo, and that specific immune responses to GST and 50 kHC were evoked by intranasal immunization.

[0490] There are five major conclusions that may be drawn from the experimental results. First, the GST-50 kHC is bound, internalized, transcytosed, and released by mouse respiratory tract epithelial cells in vivo. Second, 50 kHC is capable of transporting GST from the apical to the basolateral side of mouse respiratory tract epithelial cells in vivo. Third, the 50 kHC is capable of transporting a 6×-histidine tag from the apical to the basolateral side of mouse respiratory tract epithelial cells in vivo. Fourth, the 50 kHC is capable of transporting more than one molecule (GST & 6×-histidine tag) at a time across mouse respiratory epithelial cells in vivo. Fifth, transcytosed GST-50 kHC is capable of evoking specific immune response to GST and 50 kHC in vivo.

### Example 50

### Intranasal Immunization of Mice With BoNT A 48 Kilodalton HC Portion

[0491] This example demonstrates that a two kilodalton segment of the HC carboxyterminus contains information necessary to bind receptors on the apical surface of epithelial cells, to be internalized, to be transcytosed, and to be released on the basolateral side of the epithelial cells in living animals. To demonstrate this, a 48 kilodalton portion of the HC was generated by deleting a 2 kilodalton fragment of carboxyterminus end of 50 kHC with trypsin digestion.

[0492] The experiment was carried out using purified recombinant 48 kHC and Swiss-Webster female mice (25 to 30 gram body weight).

[0493] For intranasal immunization, mice received 0.4 mg/kg of 48 kHC in a 10 μl of PBS. Mice were lightly anesthetized with isoflurane (ISO-THESIA™, Abbott Laboratories North, Chicago, Ill., U.S.A.). Protein was administered by a single application of 10 μl solution to the nares. The heads of animals were maintained in an upright position to minimize drainage into the posterior pharynx. Three doses were given at two week intervals. The mice were bled seven days after the third immunization, and the specimens were analyzed by ELISA for immunoreactivity to botulinum toxin A. The mice were also challenged with a lethal dose of botulinum toxin A (1 μg/mouse) ten days after the third immunization, and the survival rate was observed for two weeks.

[0494] All the animals died within twenty four hours after the lethal challenge of botulinum toxin (i.e., there was little protection). In addition, there was only a low level of serum IgG to the antigen. The results show that the deleted 2 kilodalton fragment of the carboxyterminus end of the HC has an important function in binding, internalization, transcytosis, and release by mouse respiratory epithelial cells in vivo.

### Example 51

### Intranasal Immunization of Mice with 50 kHC and Cholera Toxin B Subunit

[0495] This example demonstrates that cholera toxin B subunit (CTB) induces systemic immune response against BoNT as well as mucosal immune response when coadministered with 50 kHC by intranasal route. These experiments were done with purified recombinant 50 kHC, cholera toxin B subunit (sigma) and Swiss-Webster female mice (body weight of 25-30 grams each).

[0496] Mice received 0.1 milligrams of CTB per kilogram body weight in 10 microliters of PBS, 40 micrograms of 50 kHC per kilogram body weight in 10 microliters of PBS, or 50 kHC and CTB by intranasal route. Mice were lightly anesthetized with isoflurane (ISO-THESIA™, Abbott Laboratories North, Chicago, Ill., U.S.A.). Protein was administered by a single application of 10 microliters of solution to the nares. The heads of animals were maintained in an upright position to minimize drainage into the posterior pharynx. Three doses were given at two week intervals. The mice were bled seven days after the third immunization, and the specimens were analyzed by ELISA for immunoreactivity to botulinum toxin A. The mice were also challenged with lethal dose of botulinum toxin A (1 μg/mouse) ten days after the third immunization, and the survival rate of observed for two weeks.

[0497] The animals immunized with CTB were dead within 2 hours after the lethal challenge of botulinum toxin. The animals immunized with low dose of 50 kHC showed 40% of protection against the BoNT A challenge and moderate level of serum Ig response (FIG. 28). The animals immunized with 50 kHC and CTB developed significant high level of serum Ig response as well as mucosal IgG response, and all the animals were protected against the lethal challenge of BoNT A.

[0498] These results showed that intranasal administration of 50 kHC does not induce a mucosal immune response even at the high dose of 0.4 milligram per kilogram, although it induces a modest level of serum Ig response and protects only 40% of animals against the lethal challenge of BoNT A. However, mucosal IgG response can be induced by co-administration with CTB, which leads to complete protection against a multilethal dose of toxin (1 μg/mouse).

### Example 52

### Oral Immunization of Mice with Purified Serotype A HC (100 kDa HC)

[0499] This example demonstrates that 100 kDa HC contains all the information necessary to bind receptors on the apical surface of intestinal cells, to be internalized, to be transcytosed, and to be released on the basolateral side of epithelial cells in living animals. These experiments were performed using HC purified from native botulinum neurotoxin serotype A, administered by gavage to Swiss-Webster female mice (body weight 25-30 grams).

[0500] For oral immunization, mice received 10 micrograms of 100 kDa HC per mouse in a 200 microliters of PBS. HC in 200 microliters of PBS was administered to each mouse using a feeding needle. An initial dose, was followed by three boosters at two week intervals. Mice were anesthethized with isoflurane (ISO-THESIA™, Abbott Laboratories, Chicago, Ill., U.S.A.), and bled from the retroorbital sinus seven days after each booster. Antibody production was assayed by ELISA and titers were calculated.

[0501] Antibody titers subsequent to each booster are illustrated in FIG. 29. The results demonstrate that mice immunized orally with 100 kDa HC developed antibodies to toxin HC. The results indicate that 100 kDa HC was absorbed from the gastrointestinal system to the circulation in vivo, and that a specific immune response was evoked by oral immunization with 100 kDa HC. Furthermore, the results show that purified 100 kDa HC is an oral vaccine against botulinum neurotoxin.

### Example 53

### Transport of Various Molecules of Differing Molecular Sizes and Differing Molecular

[0502] Functions across Epithelial Cells In Vitro and In Vivo

[0503] This example demonstrates that the HC of botulinum toxin, as well as fragments of the HC, have a very broad capacity to transport molecules across epithelial cells. This means that the transport molecule (i.e., the HC or fragments of the HC) can carry a wide array of cargo molecules (ligands, enzymes, antigens, etc.) into the general circulation by binding to the surface of epithelial cells, undergoing endocytosis and transcytosis, and then release into blood and lymph.

[0504] In vitro experiments and in vivo experiments were performed as described in Examples 1 to 52. The results of these experiments demonstrate that the HC or its fragments can transport molecules of widely differing molecular weights, as shown in Table 2, below, and widely differing functions, as shown in Table 2, below, across epithelial cells.

TABLE 2
Molecules of varying sizes

| Molecule | Size (kilodaltons) |
|---|---|
| biotin | 244 |
| Bolton-Hunter Reagent (¹²⁵I) | 387 |
| Alexa 568 | 792 |
| 6 x histidine tag | 840 |
| S-Tag | 1,748 |
| glutathione-S-transferase | 26,000 |
| (GST) | |
| Green Fluorescent protein | 27,000 |
| (GFP) | |
| BoNT LC | 50,000 |

TABLE 3
Molecules of Differing Functions

| Molecule | Functional Properties |
|---|---|
| biotin | ligand binding |
| horseradish peroxidase | exhibits catalytic activity |
| Bolton-Hunter Reagent (¹²⁵I) | emits ionizing radiation |
| Alexa 568 | emits fluorescent signal |
| various antigens | evoke antibody response |
| BoNT LC | exhibits catalytic activity |

[0505] There are eight major conclusions that stem from the experimental results. First, the HC of botulinum toxin is bound, internalized, transcytosed and released by epithelial cells that form a boundary between the outside world and the general circulation. Second, fragments of the HC of botulinum toxin are bound, internalized, transcytosed and released by epithelial cells that form a boundary between the outside world and the general circulation. Third, the HC and its fragments, when modified to allow for attachment of individual molecules, continue to display all the properties needed to cross epithelial barriers. Fourth, the HC and its fragments can transport a variety of molecules individually across epithelial cells. Fifth, when modified to allow for attachment of more than one molecule, the HC and its fragments continue to display all the properties needed to cross epithelial cells. Sixth, the HC and its fragments can transport more than one molecule at a time across epithelial cells. Seventh, the HC and its fragments can transport molecules of differing molecular weights at the same time. Eighth, the HC and its fragments can transport molecules of differing functions at the same time.

[0506] It will be appreciated by those skilled in the art that changes could be made to the embodiments described above without departing from the broad inventive concept thereof. It is understood, therefore, that this invention is not limited to the particular embodiments disclosed, but it is intended to cover modifications within the spirit and scope of the present invention as defined by the appended claims.

We claim:

1. A composition for translocating an entity across a non-keratinized epithelium of an animal, the composition comprising an entity linked to a carboxyterminal fragment of the HC of a Clostridium botulinum neurotoxin (BoNT), wherein the size of the entity is not greater than the lumenal capacity of vesicles of cells of the epithelium.

2. The composition of claim 1, wherein the BoNT is selected from the group consisting of the BoNTs of the serotypes A, B, and E.

3. The composition of claim 1, wherein the fragment comprises at least about 2% by molecular mass of the HC of a Clostridium botulinum neurotoxin (BoNT).

4. The composition of claim 1, wherein the fragment comprises at least about 5% by molecular mass of the HC of a Clostridium botulinum neurotoxin (BoNT).

5. The composition of claim 1, wherein the fragment comprises at least about 30% by molecular mass of the HC of a Clostridium botulinum neurotoxin (BoNT).

6. The composition of claim 1, wherein the fragment comprises at least about 50% by molecular mass of the HC of a Clostridium botulinum neurotoxin (BoNT).

7. The composition of claim 1, wherein the fragment comprises about 20 to about 50 residues of the HC of a Clostridium botulinum neurotoxin (BoNT).

8. The composition of claim 1, wherein the fragment comprises at least about 35 amino acid residues of the HC of a Clostridium botulinum neurotoxin (BoNT).

9. The composition of claim 1, wherein the fragment comprises at least about 60 amino acid residues of the HC of a Clostridium botulinum neurotoxin.

10. The composition of claim 1, wherein the fragment comprises a domain selected from a β-trefoil domain and a lectin binding domain.

11. The composition of claim 1, wherein the fragment is linked to the entity by an intervening molecule.

12. The composition of claim 11, wherein the intervening molecule is selected from the group consisting of avidin, an antibody substance, and biotin.

13. The composition of claim 1, wherein the entity is linked to the fragment by a peptide bond.

14. The composition of claim 1, wherein the entity is linked near the amino terminal end of the fragment.

15. The composition of claim 1, wherein the entity is linked to the amino terminal end of the fragment.

16. The composition of claim 1, wherein the entity is a supramolecular complex.

17. The composition of claim 16, wherein the supramolecular complex is a multi-subunit protein, at least one sub-unit of the protein being linked to the fragment.

18. The composition of claim 1, wherein the entity is a polypeptide.

19. The composition of claim 18, wherein the polypeptide is an immunogenic portion of a protein associated with a pathogen of an animal.

20. The composition of claim 19, wherein the pathogen is selected from the group consisting of Bacillus anthracis, Bordetella pertussis, Brucella abortus, Brucella canis, Brucella melitensis, Brucella suis, Clostridium perfringens, Clostridium tetani, Corynebacterium diptheriae, Coxiella burnetii, Crimean-Congo hemorrhagic fever virus, Francisella tularensis, Pseudomonas pseudomallei, ricin, Rift Valley fever virus, the coronavirus that is the causative agent of Sudden Acute Respiratory Syndrome (SARS), saxitoxin, Staphylococcal enterotoxin B, trichothecene mycotoxins, Variola major Venezuelan equine encephalitis viruses, and Vibrio cholera.

21. The composition of claim 19, wherein the animal is a human and the pathogen is Clostridium botulinum neurotoxin.

22. The composition of claim 1, wherein the entity is an antibody substance.

23. The composition of claim 22, wherein the antibody substance is selected from the group consisting of a tetra-subunit immunoglobulin and a single-chain antibody.

24. The composition of claim 1, further comprising a plurality of entities.

25. The composition of claim 1, wherein the animal is a mammal.

26. The composition of claim 1, wherein the epithelium is selected from the group consisting of anal epithelium, gastrointestinal epithelium, nasal epithelium, ocular epithelium, pulmonary epithelium, and vaginal epithelium.

27. The composition of claim 1, wherein the molecular mass of the entity is no greater than about 1000 daltons.

28. The composition of claim 1, wherein the molecular mass of the entity is about 300 daltons to about 550 daltons.

29. The composition of claim 1, further comprising an auxiliary protein selected from the group consisting of polypeptides of SEQ ID NOs: 20 to 168, and 170 to 188.

30. A composition that elicits an immune response against an antigen in a vertebrate, the composition comprising at least one epitope of the antigen linked to a carboxyterminal fragment of the HC of a Clostridium botulinum neurotoxin (BoNT), wherein the size of the epitope is not greater than the lumenal capacity of vesicles of cells of the epithelium.

31. The composition of claim 30, wherein the immune response is a systemic immune response.

32. The composition of claim 30, wherein the immune response is a mucosal immune response.

33. The composition of claim 30, wherein the antigen is selected from antigens of Bacillus anthracis, Bordetella pertussis, Brucella abortus, Brucella canis, Brucella melitensis, Brucella suis, Clostridium perfringens, Clostridium tetani, Corynebacterium diptheriae, Coxiella burnetii, Crimean-Congo hemorrhagic fever virus, Francisella tularensis, Pseudomonas pseudomallei, ricin, Rift Valley fever virus, the coronavirus that is the causative agent of Sudden Acute Respiratory Syndrome (SARS), saxitoxin, smallpox virus, Staphylococcal enterotoxin B, trichothecene mycotoxins, Variola major Venezuelan equine encephalitis viruses, and Vibrio cholera.

34. The composition of claim 30, wherein the fragment comprises at least about 2% by molecular mass of the HC of a Clostridium botulinum neurotoxin (BoNT).

35. The composition of claim 30, wherein the fragment comprises at least about 5% by molecular mass of the HC of a Clostridium botulinum neurotoxin (BoNT).

36. The composition of claim 30, wherein the fragment comprises at least about 30% by molecular mass of the HC of a Clostridium botulinum neurotoxin (BoNT).

37. The composition of claim 30, wherein the fragment comprises at least about 50% by molecular mass of the HC of a Clostridium botulinum neurotoxin (BoNT).

38. The composition of claim 30, wherein the fragment comprises about 20 to about 50 residues of the HC of a Clostridium botulinum neurotoxin (BoNT).

39. The composition of claim 30, wherein the fragment comprises at least about 35 amino acid residues of the HC of a Clostridium botulinum neurotoxin (BoNT).

40. The composition of claim 30, wherein the fragment comprises at least about 60 amino acid residues of the HC of a Clostridium botulinum neurotoxin.

41. A vaccine comprising an antigen linked to a carboxyterminal fragment of HC of a Clostridium botulinum neurotoxin (BoNT), wherein the antigen induces protective immunity against a pathogen of a vertebrate when the antigen is delivered to the circulation of the vertebrate.

42. The vaccine of claim 41, formulated for administration to a human by a route selected from the group consisting of anal, nasal, pulmonary, ocular, oral and vaginal routes.

43. The vaccine of claim 41, comprising a plurality of antigens that induce immunity against a plurality of pathogens, wherein each antigen is linked to a fragment of a HC of Clostridium botulinum neurotoxin (BoNT).

44. A vaccine comprising an antigen linked to a carboxyterminal fragment of a HC of a Clostridium botulinum neurotoxin (BoNT), wherein the antigen induces protective immunity against Clostridium botulinum neurotoxin in a vertebrate when the antigen is delivered to the circulation of the vertebrate.

45. A composition that elicits an immune response against an antigen when the antigen is contacted with a non-keratinized epithelium of a vertebrate, the composition comprising at least one epitope of the antigen linked to a carboxyterminal fragment of the HC a Clostridium botulinum neurotoxin (BoNT).

46. A method of translocating an entity across a non-keratinized epithelium of an animal, wherein the size of the entity is not greater than the lumenal capacity of vesicles of cells of the epithelium, the method comprising contacting the epithelium with a composition comprising the entity linked to a carboxyterminal fragment of the HC of a Clostridium botulinum neurotoxin (BoNT).

47. The method of claim 46, wherein the BoNT is selected from the group consisting of the BoNTs of the serotypes A, B, and E.

48. The method of claim 46, wherein the fragment comprises at least about 2% by molecular mass of the HC of a Clostridium botulinum neurotoxin (BoNT).

49. The method of claim 46, wherein the fragment comprises at least about 5% by molecular mass of the HC of a Clostridium botulinum neurotoxin (BoNT).

50. The method of claim 46, wherein the fragment comprises at least about 30% by molecular mass of the HC of a Clostridium botulinum neurotoxin (BoNT).

51. The method of claim 46, wherein the fragment comprises at least about 50% by molecular mass of the HC of a Clostridium botulinum neurotoxin (BoNT).

52. The method of claim 46, wherein the fragment comprises about 20 to about 50 residues of the HC of a Clostridium botulinum neurotoxin (BoNT).

53. The method of claim 46, wherein the fragment comprises at least about 35 amino acid residues of the HC of a Clostridium botulinum neurotoxin (BoNT).

54. The method of claim 46, wherein the fragment comprises at least about 60 amino acid residues of the HC of a Clostridium botulinum neurotoxin.

55. The method of claim 54, wherein the fragment is linked to the entity by an intervening molecule.

56. The method of claim 61, wherein the intervening molecule is selected from the group consisting of avidin, an antibody substance, and biotin.

57. The method of claim 46, wherein the entity is linked to the fragment by a peptide bond.

58. The method of claim 46, wherein the entity is linked near the amino terminal end of the fragment.

59. The method of claim 46, wherein the entity is linked to the amino terminal end of the fragment.

60. The method of claim 46, wherein the entity is a supramolecular complex.

61. The method of claim 46, wherein the supramolecular complex is a multi-subunit protein, at least one sub-unit of the protein being linked to the fragment.

62. The method of claim 46, wherein the entity is a polypeptide.

63. The method of claim 62, wherein the polypeptide is an immunogenic portion of a protein associated with a pathogen of an animal.

64. The method of claim 62, wherein the pathogen is selected from the group consisting of Bacillus anthracis, Bordetella pertussis, Brucella abortus, Brucella canis, Brucella melitensis, Brucella suis, Clostridium perfringens, Clostridium tetani, Corynebacterium diptheriae, Coxiella burnetii, Crimean-Congo hemorrhagic fever virus, Francisella tularensis, Pseudomonas pseudomallei, ricin, Rift Valley fever virus, the coronavirus that is the causative agent of Sudden Acute Respiratory Syndrome (SARS), saxitoxin, smallpox virus, Staphylococcal enterotoxin B, trichothecene mycotoxins, Variola major, Venezuelan equine encephalitis viruses, and Vibrio cholera.

65. The method of claim 62, wherein the animal is a human and the pathogen is Clostridium botulinum neurotoxin.

66. The method of claim 46, wherein the entity is an antibody substance.

67. The method of claim 46, wherein the antibody substance is selected from the group consisting of a tetra-subunit immunoglobulin and a single-chain antibody.

68. The method of claim 46 further comprising a plurality of entities.

69. The method of claim 46 wherein the animal is a mammal.

70. The method of claim 47, wherein the composition further comprises an auxiliary protein selected from the group consisting of the polypeptides SEQ ID NOs: 20 to 168, and 170 to 188.

71. A method of inducing an immune response against an entity in a vertebrate, the method comprising
a) linking the entity to a carboxyterminal fragment of the HC of a Clostridium botulinum neurotoxin (BoNT), wherein the size of the entity is not greater than the lumenal capacity of vesicle cells of the epithelium; and
b) contacting the fragment-linked entity with the epithelium.

72. The method of claim 71, wherein the vertebrate is a human.

73. The method of claim 72, wherein the entity is an antigen of a human pathogen.

74. A method of inducing an immune response against Clostridium neurotoxin (BoNT) in a vertebrate, the method comprising contacting a composition to an epithelium of a vertebrate, wherein the composition comprises an entity linked to a carboxyterminal fragment of HC of a Clostridium botulinum neurotoxin (BoNT) and the entity is an antigen that induces protective immunity against botulinum neurotoxin in a vertebrate when the antigen is delivered to the circulation of the vertebrate.

75. A pharmaceutical composition for rapid delivery of an entity to the bloodstream of a vertebrate, the composition comprising the entity linked to a carboxyterminal fragment of the HC of Clostridium botulinum neurotoxin (BoNT), wherein the composition is formulated for pulmonary administration.

76. A pharmaceutical composition for rapid delivery of an entity to the bloodstream of a vertebrate, the composition comprising the entity linked to a carboxyterminal fragment of the HC of Clostridium botulinum neurotoxin (BoNT), wherein the composition is formulated for oral administration.

77. A translocating polypeptide that comprises an immunogenic polypeptide linked to a carboxyterminal fragment of the HC of a Clostridium botulinum neurotoxin.

The application's sequence listing, which the Patent Office published only in electronic form, follows.

SEQUENCE LISTING (192 sequences)

SEQ ID NO: 1 - protein, 1296 aa, Clostridium botulinum
MPFVNKQFNYKDPVNGVDIAYIKIPNAGQMQPVKAFKIHNKIWVIPERDTFTNPEEGDLNPPPEAKQVPVSYYDSTYLSTDNEKDNYLKGVTKLFERIYSTDLGRMLLTSIVRGIPFWGGSTIDTELKVIDTNCINVIQPDGSYRSEELNLVIIGPSADIIQFECKSFGHDVLNLTRNGYGSTQYIRFSPDFTFGFEESLEVDTNPLLGAGKFATDPAVTLAHELIHAEHRLYGIAINPNRVFKVNTNAYYEMSGLEVSFEELRTFGGHDAKFIDSLQENEFRLYYYNKFKDVASTLNKAKSIIGTTASLQYMKNVFKEKYLLSEDTSGKFSVDKLKFDKLYKMLTEIYTEDNFVNFFKVINRKTYLNFDKAVFRINIVPDENYTIKDGFNLKGANLSTNFNGQNTEINSRNFTRLKNFTGLFEFYKLLCVRGIIPFKTKSLDEGYNKALNDLCIKVNNWDLFFSPSEDNFTNDLDKVEEITADTNIEAAEENISLDLIQQYYLTFDFDNEPENISIENLSSDIIGQLEPMPNIERFPNGKKYELDKYTMFHYLRAQEFEHGDSRIILTNSAEEALLKPNVAYTFFSSKYVKKINKAVEAFMFLNWAEELVYDFTDETNEVTTMDKIADITIIVPYIGPALNIGNMLSKGEFVEAIIFTGVVAMLEFIPEYALPVFGTFAIVSYIANKVLTVQTINNALSKRNEKWDEVYKYTVTNWLAKVNTQIDLIREKMKKALENQAEATKAIINYQYNQYTEEEKNNINFNIDDLSSKLNESINSAMININKFLDQCSVSYLMNSMIPYAVKRLKDFDASVRDVLLKYIYDNRGTLVLQVDRLKDEVNNTLSADIPFQLSKYVDNKKLLSTFTEYIKNIVNTSILSIVYKKDDLIDLSRYGAKINIGDRVYYDSIDKNQIKLINLESSTIEVILKNAIVYNSMYENFSTSFWIKIPKYFSKINLNNEYTIINCIENNSGWKVSLNYGEIIWTLQDNKQNIQRVVFKYSQMVNISDYINRWIFVTITNNRLTKSKIYINGRLIDQKPISNLGNIHASNKIMFKLDGCRDPRRYIMIKYFNLFDKELNEKEIKDLYDSQSNSGILKDFWGNYLQYDKPYYMLNLFDPNKYVDVNNIGIRGYMYLKGPRGSVVTTNIYLNSTLYEGTKFIIKKYASGNEDNIVRNNDRVYINVVVKNKEYRLATNASQAGVEKILSALEIPDVGNLSQVVVMKSKDDQGIRNKCKMNLQDNNGNDIGFIGFHLYDNIAKLVASNWYNRQVGKASRTFGCSWEFIPVDDGWGESSL

SEQ ID NO: 2 - protein, 1291 aa, Clostridium botulinum
MPVTINNFNYNDPIDNNNIIMMEPPFARGTGRYYKAFKITDRIWIIPERYTFGYKPEDFNKSSGIFNRDVCEYYDPDYLNTNDKKNIFLQTMIKLFNRIKSKPLGEKLLEMIINGIPYLGDRRVPLEEFNTNIASVTVNKLISNPGEVERKKGIFANLIIFGPGPVLNENETIDIGIQNHFASREGFGGIMQMKFCPEYVSVFNNVQENKGASIFNRRGYFSDPALILMHELIHVLHGLYGIKVDDLPIVPNEKKFFMQSTDAIQAEELYTFGGQDPSIITPSTDKSIYDKVLQNFRGIVDRLNKVLVCISDPNININIYKNKFKDKYKFVEDSEGKYSIDVESFDKLYKSLMFGFTETNIAENYKIKTRASYFSDSLPPVKIKNLLDNEIYTIEEGFNISDKDMEKEYRGQNKAINKQAYEEISKEHLAVYKIQMCKSVKAPGICIDVDNEDLFFIADKNSFSDDLSKNERIEYNTQSNYIENDFPINELILDTDLISKIELPSENTESLTDFNVDVPVYEKQPAIKKIFTDENTIFQYLYSQTFPLDIRDISLTSSFDDALLFSNKVYSFFSMDYIKTANKVVEAGLFAGWVKQIVNDFVIEANKSNTMDKIADISLIVPYIGLALNVGNETAKGNFENAFEIAGASILLEFIPELLIPVVGAFLLESYIDNKNKIIKTIDNALTKRNEKWSDMYGLIVAQWLSTVNTQFYTIKEGMYKALNYQAQALEEIIKYRYNIYSEKEKSNINIDFNDINSKLNEGINQAIDNINNFINGCSVSYLMKKMIPLAVEKLLDFDNTLKKNLLNYIDENKLYLIGSAEYEKSKVNKYLKTIMPFDLSIYTNDTILIEMFNKYNSEILNNIILNLRYKDNNLIDLSGYGAKVEVYDGVELNDKNQFKLTSSANSKIRVTQNQNIIFNSVFLDFSVSFWIRIPKYKNDGIQNYIHNEYTIINCMKNNSGWKISIRGNRIIWTLIDINGKTKSVFFEYNIREDISEYINRWFFVTITNNLNNAKIYINGKLESNTDIKDIREVIANGEIIFKLDGDIDRTQFIWMKYFSIFNTELSQSNIEERYKIQSYSEYLKDFWGNPLMYNKEYYMFNAGNKNSYIKLKKDSPVGEILTRSKYNQNSKYINYRDLYIGEKFIIRRKSNSQSINDDIVRKEDYIYLDFFNLNQEWRVYTYKYFKKEEEKLFLAPISDSDEFYNTIQIKEYDEQPTYSCQLLFKKDEESTDEIGLIGIHRFYESGIVFEEYKDYFCISKWYLKEVKRKPYNLKLGCNWQFIPKDEGWTE

SEQ ID NO: 3 - protein, 1291 aa, Clostridium botulinum
MPITINNFNYSDPVDNKNILYLDTHLNTLANEPEKAFRITGNIWVIPDRFSRNSNPNLNKPPRVTSPKSGYYDPNYLSTDSDKDPFLKEIIKLFKRINSREIGEELIYRLSTDIPFPGNNNTPINTFDFDVDFNSVDVKTRQGNNWVKTGSINPSVIITGPRENIIDPETSTFKLTNNTFAAQEGFGALSIISISPRFMLTYSNATNDVGEGRFSKSEFCMDPILILMHELNHAMHNLYGIAIPNDQTISSVTSNIFYSQYNVKLEYAEIYAFGGPTIDLIPKSARKYFEEKALDYYRSIAKRLNSITTANPSSFNKYIGEYKQKLIRKYRFVVESSGEVTVNRNKFVELYNELTQIFTEFNYAKIYNVQNRKIYLSNVYTPVTANILDDNVYDIQNGFNIPKSNLNVLFMGQNLSRNPALRKVNPENMLYLFTKFCHKAIDGRSLYNKTLDCRELLVKNTDLPFIGDISDVKTDIFLRKDINEETEVIYYPDNVSVDQVILSKNTSEHGQLDLLYPSIDSESEILPGENQVFYDNRTQNVDYLNSYYYLESQKLSDNVEDFTFTRSIEEALDNSAKVYTYFPTLANKVNAGVQGGLFLMWANDVVEDFTTNILRKDTLDKISDVSAIIPYIGPALNISNSVRRGNFTEAFAVTGVTILLEAFPEFTIPALGAFVIYSKVQERNEIIKTIDNCLEQRIKRWKDSYEWMMGTWLSRIITQFNNISYQMYDSLNYQAGAIKAKIDLEYKKYSGSDKENIKSQVENLKNSLDVKISEAMNNINKFIRECSVTYLFKNMLPKVIDELNEFDRNTKAKLINLIDSHNIILVGEVDKLKAKVNNSFQNTIPFNIFSYTNNSLLKDIINEYFNNINDSKILSLQNRKNTLVDTSGYNAEVSEEGDVQLNPIFPFDFKLGSSGEDRGKVIVTQNENIVYNSMYESFSISFWIRINKWVSNLPGYTIIDSVKNNSGWSIGIISNFLVFTLKQNEDSEQSINFSYDISNNAPGYNKWFFVTVTNNMMGNMKIYINGKLIDTIKVKELTGINFSKTITFEINKIPDTGLITSDSDNINMWIRDFYIFAKELDGKDINILFNSLQYTNVVKDYWGNDLRYNKEYYMVNIDYLNRYMYANSRQIVFNTRRNNNDFNEGYKIIIKRIRGNTNDTRVRGGDILYFDMTINNKAYNLFMKNETMYADNHSTEDIYAIGLREQTKDINDNIIFQIQPMNNTYYYASQIFKSNFNGENISGICSIGTYRFRLGGDWYRHNYLVPTVKQGNYASLLESTSTHWGFVPVSE

SEQ ID NO: 4 - protein, 1276 aa, Clostridium botulinum
MTWPVKDFNYSDPVNDNDILYLRIPQNKLITTPVKAFMITQNIWVIPERFSSDTNPSLSKPPRPTSKYQSYYDPSYLSTDEQKDTFLKGIIKLFKRINERDIGKKLINYLVVGSPFMGDSSTPEDTFDFTRHTTNIAVEKFENGSWKVTNIITPSVLIFGPLPNILDYTASLTLQGQQSNPSFEGFGTLSILKVAPEFLLTFSDVTSNQSSAVLGKSIFCMDPVIALMHELTHSLHQLYGINIPSDKRIRPQVSEGFFSQDGPNVQFEELYTFGGLDVEIIPQIERSQLREKALGHYKDIAKRLNNINKTIPSSWISNIDKYKKIFSEKYNFDKDNTGNFVVNIDKFNSLYSDLTNVMSEVVYSSQYNVKNRTHYFSRHYLPVFANILDDNIYTIRDGFNLTNKGFNIENSGQNIERNPALQKLSSESVVDLFTKVCLRLTKNSRDDSTCIKVKNNRLPYVADKDSISQEIFENKIITDETNVQNYSDKFSLDESILDGQVPINPEIVDPLLPNVNMEPLNLPGEEIVFYDDITKYVDYLNSYYYLESQKLSNNVENITLTTSVEEALGYSNKIYTFLPSLAEKVNKGVQAGLFLNWANEVVEDFTTNIMKKDTLDKISDVSVIIPYIGPALNIGNSALRGNFNQAFATAGVAFLLEGFPEFTIPALGVFTFYSSIQEREKIIKTIENCLEQRVKRWKDSYQWMVSNWLSRITTQFNHINYQMYDSLSYQADAIKAKIDLEYKKYSGSDKENIKSQVENLKNSLDVKISEAMNNINKFIRECSVTYLFKNMLPKVIDELNKFDLRTKTELINLIDSHNIILVGEVDRLKAKVNESFENTMPFNIFSYTNNSLLKDIINEYFNSINDSKILSLQNKKNALVDTSGYNAEVRVGDNVQLNTIYTNDFKLSSSGDKIIVNLNNNILYSAIYENSSVSFWIKISKDLTNSHNEYTIINSIEQNSGWKLCIRNGNIEWILQDVNRKYKSLIFDYSESLSHTGYTNKWFFVTITNNIMGYMKLYINGELKQSQKIEDLDEVKLDKTIVFGIDENIDENQMLWIRDFNIFSKELSNEDINIVYEGQILRNVIKDYWGNPLKFDTEYYIINDNYIDRYIAPESNVLVLVQYPDRSKLYTGNPITIKSVSDKNPYSRILNGDNIILHMLYNSRKYMIIRDTDTIYATQGGECSQNCVYALKLQSNLGNYGIGIFSIKNIVSKNKYCSQIFSSFRENTMLLADIYKPWRFSFKNAYTPVAVTNYETKLLSTSSFWKFISRDPGWVE

SEQ ID NO: 5 - protein, 1251 aa, Clostridium botulinum
MPTINSFNYNDPVNNRTILYIKPGGCQQFYKSFNIMKNIWIIPERNVIGTIPQDFLPPTSLKNGDSSYYDPNYLQSDQEKDKFLKIVTKIFNRINDNLSGRILLEELSKANPYLGNDNTPDGDFIINDASAVPIQFSNGSQSILLPNVIIMGAEPDLFETNSSNISLRNNYMPSNHGFGSIAIVTFSPEYSFRFKDNSMNEFIQDPALTLMHELIHSLHGLYGAKGITTKYTITQKQNPLITNIRGTNIEEFLTFGGTDLNIITSAQSNDIYTNLLADYKKIASKLSKVQVSNPLLNPYKDVFEAKYGLDKDASGIYSVNINKFNDIFKKLYSFTEFDLATKFQVKCRQTYIGQYKYFKLSNLLNDSIYNISEGYNINNLKVNFRGQNANLNPRIITPITGRGLVKKIIRFCKNIVSVKGIRKSICIEINNGELFFVASENSYNDDNINTPKEIDDTVTSNNNYENDLDQVILNFNSESAPGLSDEKLNLTIQNDAYIPKYDSNGTSDIEQHDVNELNVFFYLDAQKVPEGENNVNLTSSIDTALLEQPKIYTFFSSEFINNVNKPVQAALFVGWIQQVLVDFTTEANQKSTVDKIADISIVVPYIGLALNIGNEAQKGNFKDALELLGAGILLEFEPELLIPTILVFTIKSFLGSSDNKNKVIKAINNALKERDEKWKEVYSFIVSNWMTKINTQFNKRKEQMYQALQNQVNALKAIIESKYNSYTLEEKNELTNKYDIEQIENELNQKVSIAMNNIDRFLTESSISYLMKLINEVKINKLREYDENVKTYLLDYIIKHGSILGESQQELNSMVIDTLNNSIPFKLSSYTDDKILISYFNKFFKRIKSSSVLNMRYKNDKYVDTSGYDSNININGDVYKYPTNKNQFGIYNDKLSEVNISQNDYIIYDNKYKNFSISFWVRIPNYDNKIVNVNNEYTIINCMRDNNSGWKVSLNHNEIIWTLQDNSGINQKLAFNYGNANGISDYINKWIFVTITNDRLGDSKLYINGNLIDKKSILNLGNIHVSDNILFKIVNCSYTRYIGIRYFNIFDKELDETEIQTLYNNEPNANILKDFWGNYLLYDKEYYLLNVLKPNNFINRRTDSTLSINNIRSTILLANRLYSGIKVKIQRVNNSSTNDNLVRKNDQVYINFVASKTHLLPLYADTATTNKEKTIKISSSGNRFNQVVVMNSVGNCTMNFKNNNGNNIGLLGFKADTVVASTWYYTHMRDNTNSNGFFWNFISEEHGWQEK

SEQ ID NO: 6 - protein, 1274 aa, Clostridium botulinum
MPVAINSFNYNDPVNDDTILYMQIPYEEKSKKYYKAFEIMRNVWIIPERNTIGTNPSDFDPPASLKNGSSAYYDPNYLTTDAEKDRYLKTTIKLFKRINSNPAGKVLLQEISYAKPYLGNDHTPIDEFSPVTRTTSVNIKLSTNVESSMLLNLLVLGAGPDIFESCCYPVRKLIDPDVVYDPSNYGFGSINIVTFSPEYEYTFNDISGGHNSSTESFIADPAISLAHELIHALHGLYGARGVTYEETIEVKQAPLMIAEKPIRLEEFLTFGGQDLNIITSAMKEKIYNNLLANYEKIATRLSEVNSAPPEYDINEYKDYFQWKYGLDKNADGSYTVNENKFNEIYKKLYSFTESDLANKFKVKCRNTYFIKYEFLKVPNLLDDDIYTVSEGFNIGNLAVNNRGQSIKLNPKIIDSIPDKGLVEKIVKFCKSVIPRKGTKAPPRLCIRVNNSELFFVASESSYNENDINTPKEIDDTTNLNNNYRNNLDEVILDYNSQTIPQISNRTLNTLVQDNSYVPRYDSNGTSEIEEYDVVDFNVFFYLHAQKVPEGETNISLTSSIDTALLEESKDIFFSSEFIDTINKPVNAALFIDWISKVIRDFTTEATQKSTVDKIADISLIVPYVGLALNIIIEAEKGNFEEAFELLGVGILLEFVPELTIPVILVFTIKSYIDSYENKNKAIKAINNSLIEREAKWKEIYSWIVSNWLTRINTQFNKRKEQMYQALQNQVDAIKTAIEYKYNNYTSDEKNRLESEYNINNIEEELNKKVSLAMKNIERFMTESSISYLMKLINEAKVGKLKKYDNHVKSDLLNYILDHRSILGEQTNELSDLVTSTLNSSIPFELSSYTNDKILIIYFNRLYKKIKDSSILDMRYENNKFIDISGYGSNISINGNVYIYSTNRNQFGIYNSRLSEVNIAQNNDIIYNSRYQNFSISFWVRIPKHYKPMNHNREYTIINCMGNNNSGWKISLRTVRDCEIIWTLQDTSGNKENLIFRYEELNRISNYINKWIFVTITNNRLGNSRIYINGNLIVEKSISNLGDIHVSDNILFKIVGCDDETYVGIRYFKVFNTELDKTEIETLYSNEPDPSILKNYWGNYLLYNKKYYLFNLLRKDKYITLNSGILNINQQRGVTEGSVFLNYKLYEGVEVIIRKNGPIDISNTDNFVRKNDLAYINVVDRGVEYRLYADTKSEKEKIIRTSNLNDSLGQIIVMDSIGNNCTMNFQNNNGSNIGLLGFHSNNLVASSWYYNNIRRNTSSNGCFWSSISKENGWKE

SEQ ID NO: 7 - protein, 1297 aa, Clostridium botulinum
  misc_feature (7)..(7): Xaa can be any naturally occurring amino acid
MPVNIKXFNYNDPINNDDIIMMEPFNDPGPGTYYKAFRIIDRIWIVPERFTYGFQPDQFNASTGVFSKDVYEYYDPTYLKTDAEKDKFLKTMIKLFNRINSKPSGQRLLDMIVDAIPYLGNASTPPDKFAANVANVSINKKIIQPGAEDQIKGLMTNLIIFGPGPVLSDNFTDSMIMNGHSPISEGFGARMMIRFCPSCLNVFNNVQENKDTSIFSRRAYFADPALTLMHELIHVLHGLYGIKISNLPITPNTKEFFMQHSDPVQAEELYTFGGHDPSVISPSTDMNIYNKALQNFQDIANRLNIVSSAQGSGIDISLYKQIYKNKYDFVEDPNGKYSVDKDKFDKLYKALMFGFTETNLAGEYGIKTRYSYFSEYLPPIKTEKLLDNTIYTQNEGFNIASKNLKTEFNGQNKAVNKEAYEEISLEHLVIYRIAMCKPVMYKNTGKSEQCIIVNNEDLFFIANKDSFSKDLAKAETIAYNTQNNTIENNFSIDQLILDNDLSSGIDLPNENTEPFTNFDDIDIPVYIKQSALKKIFVDGDSLFEYLHAQTFPSNIENLQLTNSLNDALRNNNKVYTFFSTNLVEKANTVVGASLFVNWVKGVIDDFTSESTQKSTIDKVSDVSIIIPYIGPALNVGNETAKENFKNAFEIGGAAILMEFIPELIVPIVGFFTLESYVGNKGHIIMTISNALKKRDQKWTDMYGLIVSQWLSTVNTQFYTIKERMYNALNNQSQAIEKIIEDQYNRYSEEDKMNINIDFNDIDFKLNQSINLAINNIDDFINQCSISYLMNRMIPLAVKKLKDFDDNLKRDLLEYIDTNELYLLDEVNILKSKVNRHLKDSIPFDLSLYTKDTILIQVFNNYISNISSNAILSLSYRGGRLIDSSGYGATMNVGSDVIFNDIGNGQFKLNNSENSNITAHQSKFVVYDSMFDNFSINFWVRTPKYNNNDIQTYLQNEYTIISCIKNDSGWKVSIKGNRIIWTLIDVNAKSKSIFFEYSIKDNISDYINKWFSITITNDRLGNANIYINGSLKKSEKILNLDRINSSNDIDFKLINCTDTTKFVWIKDFNIFGRELNATEVSSLYWIQSSTNTLKDFWGNPLRYDTQYYLFNQGMQNIYIKYFSKASMGETAPRTNFNNAAINYQNLYLGLRFIIKKASNSRNINNDNIVREGDYIYLNIDNISDESYRVYVLVNSKEIQTQLFLAPINDDPTFYDVLQIKKYYEKTTYNCQILCEKDTKTFGLFGIGKFVKDYGYVWDTYDNYFCISQWYLRRISENINKLRLGCNWQFIPVDEGWTE

SEQ ID NO: 8 - DNA, 25 bp, Clostridium botulinum
cccaataacaattaacaactttaat

SEQ ID NO: 9 - DNA, 36 bp, Clostridium botulinum
tttctgcagctatttattatataatgatctaccatc

SEQ ID NO: 10 - DNA, 4067 bp, Clostridium botulinum
tgatatgtaataatgatatgtcaaaatatttgtatttatggtcatttaaataattaataatttaattaattttaaatattataagaggtgttaaatatgccatttgttaataaacaatttaattataaagatcctgtaaatggtgttgatattgcttatataaaaattccaaatgcaggacaaatgcaaccagtaaaagcttttaaaattcataataaaatatgggttattccagaaagagatacctttacaaaccctgaagaaggagatttaaatccaccaccagaagcaaaacaagttccagtttcatattatgattcaacatatttaagtacagataatgaaaaagataattatttaaagggagttacaaaattatttgagagaatttattcaactgatcttggaagaatgttgttaacatcaatagtaaggggaataccattttggggtggaagtacaatagatacagaattaaaagttattgatactaattgtattaatgtgatacagccagatggtagttatagatcagaagagcttaatctagtaataataggaccctcagctgatattatacagtttgaatgtaaaagctttggacatgatgttttgaatcttacgcgaaatggttatggctctactcaatacattagatttagcccagattttacatttggttttgaggagtcacttgaagttgatacaaatcctcttttaggtgcaggcaaatttgctacagatccagcagtaacattagcacatgaacttatacatgccgaacatagattatatggaatagcaattaatccaaatagggtttttaaagtaaatactaatgcctattatgaaatgagtgggttagaagtaagctttgaggaacttagaacatttgggggacatgatgcaaagtttatagatagtttacaggaaaacgaatttcgtctatattattataataagtttaaagatgtagcaagtacacttaataaagctaaatcaataataggtactactgcttcattacagtatatgaaaaatgtttttaaagagaaatatctcctatctgaagatacatctggaaaattttcggtagataaattaaaatttgataagttatacaaaatgttaacagagatttacacagaggataattttgttaatttttttaaagtaattaacagaaaaacatatttgaattttgataaagccgtatttagaataaatatagtacctgatgaaaattacacaataaaggatggatttaatttaaaaggtgcaaatttatcaacaaattttaatggtcagaatacagaaattaatagtaggaattttactagattaaaaaattttacaggattatttgaattttataagctgctatgtgtaagagggataataccttttaaaactaaatcattagatgaaggatacaataaggcattaaatgatttatgtatcaaagttaataattgggacttgttttttagtccttcagaagataattttactaatgatttagataaagtagaagaaattacagctgataccaatatagaagcagcagaagaaaatattagtttagatttaatacaacaatattatttaacttttgattttgataatgaacctgaaaatatttcaatagaaaatctttcaagtgatattataggccaattagagcctatgcctaatatagaaagatttcctaatggaaaaaagtatgagttagataaatatactatgttccattatcttcgtgctcaagaatttgaacatggtgattctagaattatcttaacaaattctgctgaagaagcattattaaagcctaatgttgcttatacatttttttcttcaaaatatgtaaagaagattaataaagccgtagaggcatttatgtttttaaattgggcagaagagttagtatatgactttaccgatgaaactaatgaagtaactactatggataaaattgctgatataactataattgttccatatatagggcctgctttaaatataggtaatatgttatctaaaggagagtttgtagaagctataatatttacgggagttgttgctatgttagaatttataccagagtatgctctccctgtatttggtacttttgcaattgtatcatatattgccaataaggttctaactgttcaaacaataaataatgctttaagtaaaagaaatgaaaaatgggatgaagtctataaatatacagtaacaaattggctagcaaaggttaatacacagattgatctaataagggaaaaaatgaaaaaagctttagaaaatcaggcagaagcaacaaaggctataataaactatcagtataatcaatatactgaggaagagaaaaataatattaattttaatattgatgatttaagttcgaaacttaatgagtctataaatagcgctatgattaacataaataaatttttggatcaatgctctgtttcatatttaatgaattctatgataccttatgctgttaaacggttaaaagattttgatgctagtgttagagatgtattattaaagtatatatatgataatagaggaactttagttcttcaagtagatagattaaaagatgaagttaataatacacttagtgcagatataccttttcagctttccaaatacgtagataataaaaaattattatctacatttactgaatatattaagaatattgttaatacctctatattgagtatagtatataaaaaagatgatttaatagatttatctaggtatggagcaaaaataaatattggcgatagagtatattatgattcaatagataaaaatcaaattaaattaattaatttagaaagtagtacaattgaggtaattttaaaaaatgctattgtatataatagtatgtatgaaaattttagtactagcttttggataaaaattcctaagtattttagcaagataaatctaaataatgaatatacaataataaattgtatagaaaataattcaggatggaaagtatcacttaattatggtgaaataatctggactttgcaggataataagcaaaacatacaaagagtagtttttaaatacagtcaaatggttaatatatcagattatataaacagatggatttttgtaactatcactaataatagactaactaaatctaaaatttatataaatggaagattaatagatcaaaaaccaatttcaaatttaggtaatattcatgctagtaataagataatgtttaaattagatggctgtagagatccacgtagatacatcatgataaaatatttcaatcttttcgataaagaattaaatgaaaaagaaatcaaagatttatatgatagtcaatcaaattcaggtattttaaaagacttttggggtaattatttacaatatgataaaccatactatatgttaaatttatttgatccaaataaatatgtcgatgtaaataatataggtattagaggttatatgtatcttaaagggcctagaggtagcgtagtgactacaaacatttatttaaattcaactttgtatgaggggacaaaatttattataaaaaaatatgcttctggaaatgaagataatattgttagaaataatgatcgtgtatatattaatgtagtagttaaaaataaagaatataggttagctactaatgcatcacaggcaggcgtagaaaaaatactaagtgcattagaaatacctgatgtaggaaatctaagtcaagtagtagtaatgaagtcaaaagatgatcaaggaataagaaataaatgcaaaatgaatttacaagataataatgggaatgatataggctttataggatttcatttgtatgataatatagctaaactagtagcaagtaattggtataatagacaagtgggaaaagctagtaggactttcggttgttcatgggagtttattcctgtagatgatggatggggagaaagttcactgtaattaatctcaaactatatgaacctgtcaagaattttgtataaacattcataaaaatttttaaattaatatgtttaagaata

SEQ ID NO: 11 - DNA, 2379 bp, Clostridium botulinum
acttttgattttgataatgaacctgaaaatatttcaatagaaaatctttcaagtgatattataggccaattagagcctatgcctaatatagaaagatttcctaatggaaaaaagtatgagttagataaatatactatgttccattatcttcgtgctcaagaatttgaacatggtgattctagaattatcttaacaaattctgctgaagaagcattattaaagcctaatgttgcttatacatttttttcttcaaaatatgtaaagaagattaataaagccgtagaggcatttatgtttttaaattgggcagaagagttagtatatgactttaccgatgaaactaatgaagtaactactatggataaaattgctgatataactataattgttccatatatagggcctgctttaaatataggtaatatgttatctaaaggagagtttgtagaagctataatatttacgggagttgttgctatgttagaatttataccagagtatgctctccctgtatttggtacttttgcaattgtatcatatattgccaataaggttctaactgttcaaacaataaataatgctttaagtaaaagaaatgaaaaatgggatgaagtctataaatatacagtaacaaattggctagcaaaggttaatacacagattgatctaataagggaaaaaatgaaaaaagctttagaaaatcaggcagaagcaacaaaggctataataaactatcagtataatcaatatactgaggaagagaaaaataatattaattttaatattgatgatttaagttcgaaacttaatgagtctataaatagcgctatgattaacataaataaatttttggatcaatgctctgtttcatatttaatgaattctatgataccttatgctgttaaacggttaaaagattttgatgctagtgttagagatgtattattaaagtatatatatgataatagaggaactttagttcttcaagtagatagattaaaagatgaagttaataatacacttagtgcagatataccttttcagctttccaaatacgtagataataaaaaattattatctacatttactgaatatattaagaatattgttaatacctctatattgagtatagtatataaaaaagatgatttaatagatttatctaggtatggagcaaaaataaatattggcgatagagtatattatgattcaatagataaaaatcaaattaaattaattaatttagaaagtagtacaattgaggtaattttaaaaaatgctattgtatataatagtatgtatgaaaattttagtactagcttttggataaaaattcctaagtattttagcaagataaatctaaataatgaatatacaataataaattgtatagaaaataattcaggatggaaagtatcacttaattatggtgaaataatctggactttgcaggataataagcaaaacatacaaagagtagtttttaaatacagtcaaatggttaatatatcagattatataaacagatggatttttgtaactatcactaataatagactaactaaatctaaaatttatataaatggaagattaatagatcaaaaaccaatttcaaatttaggtaatattcatgctagtaataagataatgtttaaattagatggctgtagagatccacgtagatacatcatgataaaatatttcaatcttttcgataaagaattaaatgaaaaagaaatcaaagatttatatgatagtcaatcaaattcaggtattttaaaagacttttggggtaattatttacaatatgataaaccatactatatgttaaatttatttgatccaaataaatatgtcgatgtaaataatataggtattagaggttatatgtatcttaaagggcctagaggtagcgtagtgactacaaacatttatttaaattcaactttgtatgaggggacaaaatttattataaaaaaatatgcttctggaaatgaagataatattgttagaaataatgatcgtgtatatattaatgtagtagttaaaaataaagaatataggttagctactaatgcatcacaggcaggcgtagaaaaaatactaagtgcattagaaatacctgatgtaggaaatctaagtcaagtagtagtaatgaagtcaaaagatgatcaaggaataagaaataaatgcaaaatgaatttacaagataataatgggaatgatataggctttataggatttcatttgtatgataatatagctaaactagtagcaagtaattggtataatagacaagtgggaaaagctagtaggactttcggttgttcatgggagtttattcctgtagatgatggatggggagaaagttcactgtaa

SEQ ID NO: 12 - DNA, 33 bp, Clostridium botulinum
cgcggtaccacctttaattttgataatgaacct

SEQ ID NO: 13 - DNA, 31 bp, Clostridium botulinum
aacccctgcagttacagtggcctttctcccc

SEQ ID NO: 14 - DNA, 1818 bp, Clostridium botulinum
gttcaaacaataaataatgctttaagtaaaagaaatgaaaaatgggatgaagtctataaatatacagtaacaaattggctagcaaaggttaatacacagattgatctaataagggaaaaaatgaaaaaagctttagaaaatcaggcagaagcaacaaaggctataataaactatcagtataatcaatatactgaggaagagaaaaataatattaattttaatattgatgatttaagttcgaaacttaatgagtctataaatagcgctatgattaacataaataaatttttggatcaatgctctgtttcatatttaatgaattctatgataccttatgctgttaaacggttaaaagattttgatgctagtgttagagatgtattattaaagtatatatatgataatagaggaactttagttcttcaagtagatagattaaaagatgaagttaataatacacttagtgcagatataccttttcagctttccaaatacgtagataataaaaaattattatctacatttactgaatatattaagaatattgttaatacctctatattgagtatagtatataaaaaagatgatttaatagatttatctaggtatggagcaaaaataaatattggcgatagagtatattatgattcaatagataaaaatcaaattaaattaattaatttagaaagtagtacaattgaggtaattttaaaaaatgctattgtatataatagtatgtatgaaaattttagtactagcttttggataaaaattcctaagtattttagcaagataaatctaaataatgaatatacaataataaattgtatagaaaataattcaggatggaaagtatcacttaattatggtgaaataatctggactttgcaggataataagcaaaacatacaaagagtagtttttaaatacagtcaaatggttaatatatcagattatataaacagatggatttttgtaactatcactaataatagactaactaaatctaaaatttatataaatggaagattaatagatcaaaaaccaatttcaaatttaggtaatattcatgctagtaataagataatgtttaaattagatggctgtagagatccacgtagatacatcatgataaaatatttcaatcttttcgataaagaattaaatgaaaaagaaatcaaagatttatatgatagtcaatcaaattcaggtattttaaaagacttttggggtaattatttacaatatgataaaccatactatatgttaaatttatttgatccaaataaatatgtcgatgtaaataatataggtattagaggttatatgtatcttaaagggcctagaggtagcgtagtgactacaaacatttatttaaattcaactttgtatgaggggacaaaatttattataaaaaaatatgcttctggaaatgaagataatattgttagaaataatgatcgtgtatatattaatgtagtagttaaaaataaagaatataggttagctactaatgcatcacaggcaggcgtagaaaaaatactaagtgcattagaaatacctgatgtaggaaatctaagtcaagtagtagtaatgaagtcaaaagatgatcaaggaataagaaataaatgcaaaatgaatttacaagataataatgggaatgatataggctttataggatttcatttgtatgataatatagctaaactagtagcaagtaattggtataatagacaagtgggaaaagctagtaggactttcggttgttcatgggagtttattcctgtagatgatggatggggagaaagttcactgtaa

SEQ ID NO: 15 - DNA, 33 bp, Clostridium botulinum
cgcggtaccgttcaaacaatagataatgcttta

SEQ ID NO: 16 - DNA, 1299 bp, Clostridium botulinum
acatttactgaatatattaagaatattgttaatacctctatattgagtatagtatataaaaaagatgatttaatagatttatctaggtatggagcaaaaataaatattggcgatagagtatattatgattcaatagataaaaatcaaattaaattaattaatttagaaagtagtacaattgaggtaattttaaaaaatgctattgtatataatagtatgtatgaaaattttagtactagcttttggataaaaattcctaagtattttagcaagataaatctaaataatgaatatacaataataaattgtatagaaaataattcaggatggaaagtatcacttaattatggtgaaataatctggactttgcaggataataagcaaaacatacaaagagtagtttttaaatacagtcaaatggttaatatatcagattatataaacagatggatttttgtaactatcactaataatagactaactaaatctaaaatttatataaatggaagattaatagatcaaaaaccaatttcaaatttaggtaatattcatgctagtaataagataatgtttaaattagatggctgtagagatccacgtagatacatcatgataaaatatttcaatcttttcgataaagaattaaatgaaaaagaaatcaaagatttatatgatagtcaatcaaattcaggtattttaaaagacttttggggtaattatttacaatatgataaaccatactatatgttaaatttatttgatccaaataaatatgtcgatgtaaataatataggtattagaggttatatgtatcttaaagggcctagaggtagcgtagtgactacaaacatttatttaaattcaactttgtatgaggggacaaaatttattataaaaaaatatgcttctggaaatgaagataatattgttagaaataatgatcgtgtatatattaatgtagtagttaaaaataaagaatataggttagctactaatgcatcacaggcaggcgtagaaaaaatactaagtgcattagaaatacctgatgtaggaaatctaagtcaagtagtagtaatgaagtcaaaagatgatcaaggaataagaaataaatgcaaaatgaatttacaagataataatgggaatgatataggctttataggatttcatttgtatgataatatagctaaactagtagcaagtaattggtataatagacaagtgggaaaagctagtaggactttcggttgttcatgggagtttattcctgtagatgatggatggggagaaagttcactgtaa

SEQ ID NO: 17 - DNA, 34 bp, Clostridium botulinum
tcttggatccacatttactgaatatattaagaat

SEQ ID NO: 18 - DNA, 35 bp, Aequoria victoria
acatgcatgcatgagtaaaggagaagaacttttca

SEQ ID NO: 19 - DNA, 32 bp, Aequoria victoria
ccggtaccccaggcccatttgtagagctcatc

SEQ ID NO: 20 - protein, 146 aa, Clostridium botulinum
MSSERTFLPNGNYKIKSLFSDSLYLTYSSGALSFSNTSSLDNQKWKLEYISSSNGFRFSNVAEPNKYLAYNDYGFIYLSSSSNNSLWNPIKIAINSYIICTLSIVNVTDYAWTIYDNNNNITDQPILNLPNFDINNSNQILKLEKL

SEQ ID NO: 21 - protein, 146 aa, Clostridium botulinum
MSSERTFLPNGNYKIKSLFSDSLYLTYSSGALSFPNTSSLDNQKWKLEYISSSNGFRFSNVAEPNKYLAYNDYGFIYLSSSSNNSLWNPIKIAINSYIICTLSIVNVTDYAWTIYDNNNNITDQPILNLPNFDINNSNQILKLEKL

SEQ ID NO: 22 - protein, 146 aa, Clostridium botulinum; identical to SEQ ID NO: 20

SEQ ID NO: 23 - protein, 146 aa, Clostridium botulinum
MSSERTFLPNGNYKIKSLFSDSLYLTYSSGSLSFLNTSSLDNQKWKLEYISSSNGFRFSNVAEPNKYLAYNDYGFIYLSSSSNNSLWNPIKIAINSYIICTLSIVNVTDYAWTIYDNNNNITDQPILNLPNFDINNSNQILKLEKL

SEQ ID NO: 24 - protein, 146 aa, Clostridium botulinum
MSSERTFLPNGNYKIKSLFSNSLYLTYSSGALSFSNTSSLDNQKWKLEYISSSNGFRFSNVAEPNKYLAYNDYGFIYLSSSSNNSLWNPIKIAINSYIICTLSIVNVTDYAWTIYDNNNNITDQPILNLPNFDINNSNQILKLEKL

SEQ ID NO: 25 - protein, 146 aa, Clostridium botulinum; identical to SEQ ID NO: 24

SEQ ID NO: 26 - protein, 126 aa, Clostridium botulinum
MSSERTFLPNGNYKIKSLFSDSLYLTYSSGALSFSNTSSLDNQKWKLEYISSSNGFRFSNVAEPNKYLAYNDYGFIYLSSSSNNSLWNPIKIAINSYIICTLSIVNVTDYAWTIYDNNNNITDHLF

SEQ ID NO: 27 - protein, 146 aa, Clostridium botulinum
MSAERTFLPNGNYNIKSIFSGSLYLSPVSGSLTFSNESSANNQKWNVEYMAENRCFKISNVAEPNKYLSYDNFGFISLDSLSNRCYWFPIKIAVNTYIMLSLNKVNELDYAWDIYDTNENILSQPLLLLPNFDIYNSNQMFKLEKI

SEQ ID NO: 28 - protein, 158 aa, Clostridium botulinum
EYYHLIYKEVNYMSVERTFLPDGNYNIKSIFSGSLYLNPVSGSLTFSSESSANNQKWNVEYMAKNRCFKISNVAEPNKYLSYDNFGFISLDSLSNKCYWFPIKIAVNTYIMLNLNKVNELDYAWDIYDTNENILSQPLLLLPNFDIYNSNQMLKLEKI

SEQ ID NO: 29 - protein, 146 aa, Clostridium botulinum
MSVERTFLPNGNYNIKSIFSGSLYLNPVSKSLTFSNESSANNQKWNVEYMAENRCFKISNVAEPNKYLSYDNFGFISLDSLSNRCYWFPIKIAVNTYIMLSLNKVNELDYAWDIYDTNENILSQPLLLLPNFDIYNSNQMFKLEKI

SEQ ID NO: 30 - protein, 147 aa, Clostridium botulinum
MTAERTFLPHGNYKIKSIFSDSLYLTPLSEIITFLNTSSENNQKWKLQYVEEKNAYKISNIAQPDKYLTYNSSQFIVLKNIGDSTALENYWIPYKIASNTYIITNLKEYDKAWDIYDLNGDISDQPLLLQQLFYYEKSNQMFIFEKI

SEQ ID NO: 31 - protein, 33 aa, Clostridium botulinum
SAERTFLPNGNYNIKSIFSGSLYLSPVSGNLTF

SEQ ID NO: 32 - protein, 33 aa, Clostridium botulinum
  misc_feature (18)..(19): Xaa can be any naturally occurring amino acid
SAERTFLPNGNYNIKVIXXGSLYLSPVSGNLTF

SEQ ID NO: 33 - protein, 20 aa, Clostridium botulinum
SVERTFLPNGNYNIKSIFSG

SEQ ID NO: 34 - protein, 19 aa, Clostridium botulinum
SVERTFLPNGNYNIKSIFS

SEQ ID NO: 35 - protein, 178 aa, Clostridium botulinum
MNKLFLQIKMLKNDNREFQEIFKHFEKTINIFTRKYNIYDNYNDILYHLWYTLKKVDLSNFNTQNDLERYISRTLKRYCLDICNKRKIDKKIIYNSEIVDKKLSLIANSYSSYLEFEFNDLISILPDDQKKIIYMKFVEDIKEIDIAKKLNISRQSVYKNKIMALERLEPILKKLINM

SEQ ID NO: 36 - protein, 178 aa, Clostridium botulinum; identical to SEQ ID NO: 35

SEQ ID NO: 37 - protein, 178 aa, Clostridium botulinum
MNKLFLQIKMLKNDNEEFQEIFKHFEKTINIFTRKYNIYDNYNDILYHLWYTLKKVDLSNFNTQNDLERYISRTLKRYCLDICNKRKIDKKIIYNSEIADKKLSLIANSYSSYSEFEFNDLISILPDDQKKIIYMKFVEDIKEIDIAKKLNISRQSVYKNKIMALERLEPILKKLINM

SEQ ID NO: 38 - protein, 178 aa, Clostridium botulinum
MNKLFLQIEMLKNDNEEFQEIFKHFEKTINIFTRKYNIYDNYNDILYHLWYTLKKVDLSNFNTQNDLERYISRTLKRYCLDICNKRKIDKKIIYNSEIADKKLSLIANSYSSYSEFEFNDLISILPDDQKKIIYMKFVEDIKEIDIAKKLNISRQSVYKNKIMALERLEPILKKLINM

SEQ ID NO: 39 - protein, 178 aa, Clostridium botulinum
MNKLFLQIEMLKSDNEEFQEIFKHFEKTINIFTRKYNIYDNYNDILYHLWYTLKKVDLSNFNTQNDLERYISRTLKRYCLDICNKRKIDKKIIYNSEIADKKLSLIANSYSSYSEFEFNDLISILPDDQKKIIYMKFVEDIKEIDIAKKLNISRQSVYKNKIMALERLEPILKKLINM

SEQ ID NO: 40 - protein, 179 aa, Clostridium botulinum
MNKLFLQIKRLKNDNREFQEIFKNFEKTIDIFTRKYNIYDNYNDILYHLWYTLKKVDLSNFNTQNDLERYISRTLKRYCLDICNKRKIDKKIIYNSEIVGEKLRLIANSYSSYSEVEFNDLISILPDDQKKIIYMKFVEDIKEIDIAKKLNISRQSVYKNKIMALGRLKPILVYIFKKF

SEQ ID NO: 41 - protein, 178 aa, Clostridium tetani
MENLFVKIKTLKNNNKEFEVIIIHFKNTVNILIRKYNLESHYNDILYHLWNILKKIDLNKFNTENDLHKYISRSLKRYCLDICNKKNRDKKIIYNSEITNIKLNLMENSCSNYLNFEFNDLISILPENQRKILYMKFFEDMKECDIAKKLHMSRQAVYKNKVLALKKLEPIVNKLINI

SEQ ID NO: 42 - protein, 179 aa, Clostridium tetani
MLMENLFVKIKTLKNNNKEFEVIIIHFKNTVNILIRKYNLESHYNDILYHLWNILKKIDLNKFNTENDLHKYISRSLKRYCLDICNKKNRDKKIIYNSEITNIKLNLMENSCSNYLNFEFNDLISILPENQRKILYMKFFEYMKECDIAKLHMSRQAVYKNKVLALKKLEPIVNKLINI

SEQ ID NO: 43 - protein, 181 aa, Clostridium botulinum
MKIMKDIFLHVKTLKNNNTEFEEIYRNFENFIDMLTRKYDVEKDYNDIVSHLWIILKKTDLNKFNTEYDLEKYISTSLKRYCIDICNKKNRNERVIYNSEFVDINLSLIEHSFSNDLEFEFNDLISILPNSQRKIIYMRFFNNMKEVDIAEELNISRQAVYKSKNLALKKLESVIKELINI

SEQ ID NO: 44 - protein, 159 aa, Clostridium botulinum
MENLFFIIKILKDDNKKFEDIYTNYKNLIDIFIKKYNLSENYNDILNHFWIILKKADLNKFNTENDLNKYISKCLKRYCLSICTKKNRDKKIIYNSEITDINLNLIQDNCFSDIEFEFKDLISILPNNQKNIIYMKFFKDMKDIEIAKKLKISRQSIYK

SEQ ID NO: 45 - protein, 159 aa, Clostridium botulinum
MEDLFFIIKILKDDNKKFEDIYTNYKNLIDIFIKKYNLSENYNDILNHFWIILKKADLNKFNTENDLNKYISKCLKRYCLSICMKKNRDKKIIYNSEITNINLNLIQDNCFNDIEFEFKDLISILPNTQKNIIYMKFFKDMKDIQIAKKLKISRQSVYK

SEQ ID NO: 46 - protein, 159 aa, Clostridium botulinum
MKNLFFLMNTLKDDNKKFEDIYMNYKDLIDIFIKKYNLSENYNDILKHFWIILIKADLNKFNTENDLNKYISKCLKRYCLSICMKKNRDKKIIYNSEITDINLNLIQDSCFNDIEFEFKDLISILPNTQQNIIYMKFFKDMKDIDIAKKLKISRQSVYK

SEQ ID NO: 47 - protein, 116 aa, Clostridium botulinum
DIVSHLWIILIKADLNKFNTENDLNKYISKCLKRYCLSICMKKNRDKKIIYNSEITDINLNLIQDSCFNDIEFEFKDLISILPNTQQNIIYMKFFKDMKDIDIAKKLKISRQSIYK

SEQ ID NO: 48 - protein, 179 aa, Clostridium botulinum
MNDLFYAIENLKHDNQHFDFIEMSLKKYIEKTSKKYNLYYDYYNDILYHLWKELIEINLKNFNSELDLRKYISTSIKRYCINICKKKNRDKKIIYNSEATYKKLEAVNVYSLYCEDFEFLDLISILNYKEKQIIYMKFFECRKDNEIARRLHLSRQSIYKIRIKSLKKLYPIVMQLVNI

SEQ ID NO: 49 - protein, 179 aa, Clostridium botulinum
MNDLFYAIENLKHDNQHFNFIEMSLKKYIEKTSKKYNLYYDYYNDILYHLWKELIEINLKNFNSELDLRKYISTSIKRYCINICKKKNRDKKIIYNSEVTYKKLDAVNVYSLYCDNFEFLDLISILNYKEKQIIYMKFFECRKDNEIARRLHLSRQSIYKIRIKSLKKLYPIVMQLVNI

SEQ ID NO: 50 - protein, 179 aa, Clostridium botulinum phage 1C
MNDLFYAIENLKHDNQHFNFIEMSLKKYIEKTSKKYNLYYDYYNDILYHLWKELIEINLKNFNSELDLRKYISTSIKRYCINICKKKNRDKKIIYNSEVTYKKLDAVNVYSLYCDNFEFLDLISILNYKEKQIIYMKFFEGRKDNEIAIRLRLSRQSIYKIRITSLKKLYPIVMQLVNI

SEQ ID NO: 51 - protein, 116 aa, Clostridium botulinum
DIFNHLWIILIKADLNKFNTENDLNKYISKCLKRYCLSICMKKNRDKKIIYNSEITDINLNLIQDNCFNDIEFEFKDLISILPNTQQNIIYMKFFKDMKDIEIAKKLKISRQSIYK

SEQ ID NO: 52 - protein, 179 aa, Clostridium botulinum D phage
MNDLFYAIENLKHDNQHFNFIEMSLKKYIEKTSKKYNLYYDYYNDILYHLWKELIEINLKNFNSELDLRKYISTSIKRYCINICKKKNRDKKIIYNSEVTYKKLDAVNVYSLYCDNFEFLDLISILNYKEKQIIYMKFFEGRKDNEIAIRLRLSRQSIYKIRIKSLKKLYPIVMQLVNI

SEQ ID NO: 53 - protein, 179 aa, Clostridium botulinum
MNDLFYAIENLKHDNQNFNFIEMSLKKYIEKTSKKYNLYYDYYNDILYHLWKELIEINLKNFNSELDLRKYISTSIKRYCINICKKKNRDKKIIYNSEVTYKKLDAVNVYSLYCDNFEFLDLISILNYKEKQIIYMKFFEGRKDNEIAIRLRLSRQSIYKIRIKSLKKLYPIVMQLVNI

SEQ ID NO: 54 - protein, 184 aa, Clostridium difficile
MQKSFYELIVLARNNSVDDLQEILFMFKPLIKKLSRVLHYEEGETDLIIFFIELIKNIKLSSFSEKSDAIIVKYIHKSLLNKTFELSRRYSKMKFNFVEFDENILNLKNNYQNKFVFEEDICFFEYILKELSGIQRKVIFYKYLKGYSDREISVKLKISRQAVNKAKNRAFKKIKKDYENYFNL

SEQ ID NO: 55 - protein, 188 aa, Clostridium tetani
MVLSLGGDIMEFIEDVKSAQAGNKASFVKLIRHYEKYFYVVSKSILDKDEDCADAIQETILNCYKNIKSLNNPKCFKAWFTKCLINNCYKILKNNKKIILLDEIEDKKYSKDEFYLVELNHLLSTLDEDLKTVIFLYYFEDLSVKDISNAINVKEGTVKSRLHRARTKLYDILRKDGEAVSYERQVNR

SEQ ID NO: 56 - protein, 184 aa, Clostridium difficile
MQKSFYELIVLARNNSVDDLQEILFMFKPLVKKLSRVLHYEEGETDLIIFFIELIKNIKLSSFSEKSDAIIVKYIHKSLLNKTFELSRRYSKMKFNFVEFDENILNMKNNYQSKSVFEEDICFFEYILKELSGIQRKVIFYKYLKGYSDREISVKLKISRQAVNKAKNRAFKKIKKDYENYFNL

SEQ ID NO: 57 - protein, 140 aa, Clostridium perfringens
MKPSSFQETIENQFDYICKQVIEDERKDYFKHLDRLSAKEVSFSDIDNYLVNSFSTVDTYVTDFQLFKLFGLRINVESDLLSEALRHLSEKKRNIILLHYFMDMSDVEIAELLNLNRSTVYRHRISGLAMIKEFMKECKE

SEQ ID NO: 58 - protein, 291 aa, Clostridium botulinum
MEHYSTIQNSLNDKIVTISCKANTDLFFYQVPGNGNVSLFQQTRNYLERWRIIYDSNKAAYKIKSMNIYNTNLVLTWNAPTHNISALQDSNADNQYWLLLKDIGNNSFIIASYKNPNLVLYADTVARNLKLSTLNNSSYIKFIIEDYVISDFKNFTCRISPILAGGKVVQQVSMTNLAVNLYIWNNDLNQKWTIIYNEEKAAYQFFNKILSNGVLTWIFSDGNTVRVSSSAQNDAQYWLINPVSDNYDRYTITNLRYKTKVLDLYGGQTADGTTIQVFNSNGGDNQIWYGL

SEQ ID NO: 59 - protein, 294 aa, Clostridium botulinum
MEHYSTIQNSLNDKIVTISCKANTDLFFYQVPGNGNVSLFQQTRNYLERWRIIYDSNKAAYKIKSMNIYNTNLVLTWNAPTHNISAQQDSNADNQYWLLLKDIGNNSFIIASYKNPNLVLYADTVARNLKLSTLNNSSYIKFIIEDYVISDFKNFTCRISPILAGGKVVQQVSMTNLAVNLYIWNNDLNQKWTIIYNEEKAAYQFFNKILSNGVLTWIFSDGNTVRVSSSAQNNDAQYWLINPVSDNYDRYTITNLRDKTKVLDLYGGQTADGTTIQVFNSNGGDNQIWTMSNP

SEQ ID NO: 60 - protein, 293 aa, Clostridium botulinum
MEHYSVIQNSLNDKIVTISCRADTNLFFYQVAGNVSLFQQTRNYLERWRIIYDSNKAAYKIKSMDIHNTNLVLTWNAPTHNISTQQDSNADNQYWLLLKDIGNNSFIIASYKNPNLVLYADTVARNLKLSTLNNSNYIKFIIEDYIISDFNNFTCKISPILDRNKVVQQVATTNLNVNLYTWDYGRNQKWTIRYNEEKAAYQFFNTILSNGVLTWIFSNGNTVRVSSSNDQNNDAQYWLINPVSDTDETYTITNLRDTTKALDLYNSQTANGTAIQVFNSNGGDNQKWNIRNP

SEQ ID NO: 61 - protein, 293 aa, Clostridium botulinum
MEHYSVIQNSLNDKIVTISCKADTNLFFYQVAGNVSLFQQTRNYLERWRLIYDSNKAAYKIKSMDIHNTNLVLTWNAPTHNISTQQDSNADNQYWLLLKDIGNNSFIIASYKNPNLVLYADTVARNLKLSTLNNSNYIKFIIEDYIISDLNNFTCKISPILDLNKVVQQVDVTNLNVNLYTWDYGRNQKWTIRYNEEKAAYQFFNTILSNGVLTWIFSNGNTVRVSSSNDQNNDAQYWLINPVSDTDETYTITNLRDTTKALDLYGGQTANGTAIQVFNYHGDDNQKWNIRNP

SEQ ID NO: 62 - protein, 292 aa, Clostridium botulinum
MEHYSVIQNSLNDEIVTISCKADTNLFFYQTVGNVSLFQQTRNYLERWRLIYDANKAAYKIKSMDSHNTNLVLTWNAPTHNISAQQDSNADNQYWLLLKDIGSNSFIIASYKNPNLVLYADTVARNLKLSTLNNSSYIKFIIEDYMISDFNNFTCKISPILDSSKVVQQVAMTDLSVNLYTWDYGRNQKWTIKYNKEKSAYQFFNTILSNGVLTWISSNGNTVRVSSIAQNNDAQYWLINPVSNAYETYTITNLHDTTKALDLYNSQTANGTTIQVFNYHGDDNQKWFIRNP

SEQ ID NO: 63 - protein, 293 aa, Clostridium botulinum
MEHYSVIQNSLNDKIVTISCKADTNLFFYQVAGNVSLFQQTRNYLERWRLIYDSNKAAYKIKSMDIHNTNLVLTWNAPTHNISTQQDSNADNQYWLLLKDIGNNSFIIASYKNPNLVLYADTVARNLKLSTLNNSNYIKFIIEDYIISDLNNFTCKISPILDRNKVVQQVDMTNLNVNLYTWDYGRNQKWTIRYNEEKAAYQFFNTILSNGVLTWIFSNGNTVRVSSSNDQNNDAQYWLINPVSDTDETYTITNLRDTTKALDLYNSQTANGTAIQVFNYHGDDNQKWNIRNP

SEQ ID NO: 64 - protein, 279 aa, Clostridium botulinum
MEHYSVIQNSLNDKIVTISCKADTNLFFYQVAGNVSLFQQTRNYLERWRLIYDSNKAAYKIKSMDIHNTNLVLTWNAPTHNISTQQDSNADNQYWLLLKDIGNNSFIIASYKNPNLVLYADTVARNLKLSTLNNSNYIKFIIEDYIISDLNNFTCKISPILDRNKVVQQVDMTNLNVNLYTWDYGRNQKWTIRYNEEKAAYQFFNTILSNGVLTWIFSNGNTVRVSSSNDQNNDAQYWLINPVSDTDETYTITNLRDTTKALDLYNSQTANGTAIQVFN

SEQ ID NO: 65 - protein, 285 aa, Clostridium botulinum
MSQTNANDLRNNEVFFISPSNNTNKVLDKISQSEVKLWNKLSGANQKWRLIYDTNKQAYKIKVMDNTSLILTWNAPLSSVSVKTDTNGDNQYWYLLQNYISRNVIIRNYMNPNLVLQYNIDDTLMVSTQTSSSNQFFKFSNCIYESFNNSTCKIQTSLTIKFIDKNQNSNNVTIWSWNNGDNQKWKILYNESKMAYTLTCIKNNEYLTWFSSIGNNVGTYRTEGNNDQYWFINYLNNDASMYTISNFSNQSKFLDVVNSGLADGTNVQVWDSNGTSAQKWIITRL

SEQ ID NO: 66 - protein, 291 aa, Clostridium botulinum D phage
MGGNNMSQTNANDLRNNEVFFISPSNNTNKVLDKISQSEVKLWNKLSGANQKWRLIYDTNKQAYKIKVMDNTSLILTWNAPLSSVSVKTDTNGDNQYWYLLQNYISRNVIIRNYMNPNLVLQYNIDDTLMVSTQTSSSNQFFKFSNCIYEALNNRNCKLQTQLNSDRFLSKNLNSQIIVLWQWFDSSRQKWIIEYNETKSAYTLKCQENNRYLTWIQNSNNYVETYQSTDSLIQYWNINYLDNDASKYILYNLQDTNRVLDVYNSQIANGTHVIVDSYHGNTNQQWIINLI

SEQ ID NO: 67 - protein, 286 aa, Clostridium botulinum phage 1C
MSQTNANDLRNNEVFFISPSNNTNKVLDKISQSEVKLWNKLSGANQKWRLIYDTNKQAYKIKVMDNTSLILTWNAPLSSVSVKTDTNGDNQYWYLLQNYISRNVIIRNYMNPNLVLQYNIDDTLMVSTQTSSSNQFFKFSNCIYEALNNRNCKLQTQLNSDRFLSKNLNSQIIVLWQWFDSSRQKWIIEYNETKSAYTLKCQENNRYLTWIQNSNNYVETYQSTDSLIQYWNINYLDNDASKYILYNLQDTNRVLDVYNSQIANGTHVIVDSYHGNTNQQWIINLI

SEQ ID NO: 68 - protein, 285 aa, Clostridium botulinum
SQTNANDLRNNEVFFISPSNNTNKVLDKISQSEVKLWNKLSGANQKWRLIYDTNKQAYKIKVMDNTSLILTWNAPLSSVSVKTDTNGDNQYWYLLQNYISRNVIIRNYMNPNLVLQYNIDDTLMVSTQTSSSNQFFKFSNCIYEALNNRNCKLQTQLNSDRFLSKNLNSQIIVLWQWFDSSRQKWIIEYNETKSAYTLKCQENNRYLTWIQNSNNYVETYQSTDSLIQYWNINYLDNDASKYILYNLQDTNRVLDVYNSQIANGTHVIVDSYHGNTNQQWIINLI

SEQ ID NO: 69 - protein, 286 aa, Clostridium botulinum
MSQTNANDLRNNEVFFISPSNNTNKVLDKISQSEVKLWNKLSGANQKWRLIYDTNKQAYTIKVMDNTSLILTWDAPLSSVSVKTDTNTNNQYWYLLQDYISRNVILRNYMNPNLVLQYNTDDTLIVSTQTNSNNQFFKFSNCIYEALNNRNCKLQTQLNSDRFLSKNLNSQIIVLWQWFDSSRQKWTIEYNETKSAYTLKCQENNRYLTWIQNSNNYVETYQSTDSLIQYWNINYLDNDASKYILYNLQDTNRVLDVYNSQTANGTHVIVDSYHGNTNQQWIINLI

SEQ ID NO: 70 - protein, 286 aa, Clostridium botulinum
MSQTNANDLRNNEVFFISPSNSTNKVLDKISQSEVKLWSKNLGSNQKWRLIYDTNKQAYKIKVMDNTSLILTWDAPLSSVSVKTDTNTNNQYWYLLQDYISRNVILRNYMNPNLVLQYNTDDTLIVSTQTSSNNQFFKFSNCIYEALNNRNCKLQTQLNSDRFLSKNLNSQIIVLWQWFDSSRQKWLIEYNETKSAYTLKCQENNRYLTWIQNSNNYVETYQSTDSLIQYWNINYLDNDASKYILYNLQDTNRVLDVYNSQIANGTNVIVDSYHGNTNQQWIINLI

SEQ ID NO: 71 - protein, 147 aa, Clostridium botulinum; identical to SEQ ID NO: 30

SEQ ID NO: 72 - protein, 623 aa, Clostridium botulinum
MSLSIKELYYAKDKSINNVNLADGNYVVNRGDGWILSRQNQNLGGNISNNGCTAIVGDLRIRETATPYYYPTASFNEEYIRNNVQNVFANFTEASEIPIGFEFSKTAPSNKSLYMYLQYTYIRYEIIKVLQNTVIERAVLYVPSLGYVKSIEFNSGEQIDKNFYFTSEDKCILNEKFIYKKIAETTTAKESNDSNNTTNLNTSQTILPYPNGLYVINKGDGYMRTNDKDLIGTLLIETNTSGSIIQPRLRNTTRPLFNTSNPTLFSQEYTEARLNDAFNIQLFNTSTALFKFVEEAPDNKNISMKAYNTYEKYELINYQDGNIADKAEYYLPSLGKCEVSDAPSPQAPVVETPVDQDGFIQTGPNENIIVGVINPSENIEEISTPIPDDYTYNIPTSIQNNACYVLFTVNTTGVYKINAQNNLPPLIIYESIGSDNMNIQSNTLSNNNIKAINYITGTDSANAESYLIVSLIKNKNYYIRIPQISSSTTNQLIFKRELGNISDLANSTVNILDNLNTSGTHYYTRQSPDVGNYISYQLTIPGDFNNIASSIFSFRTRNNQGIGTLYRLTESINGYNLITIKNYSDLLNNVEPISLLNGATYIFRVKVTELNNYNIIFDAYRNS

SEQ ID NO: 73 - protein, 623 aa, Clostridium botulinum
MSLSIKELYYTKDKSINNVNLADGNYVVNRGDGWILSRQNQNLGGNISNNGCTAIVGDLRIRETATPYYYPTASFNEEYIRNNVQNVFANFTEASEIPIGFEFSKTAPSNKGLYMYLQYTYIRYEIIKVLRNTVIERAVLYVPSLGYAKSIEFNSGEQIDKNFYFTSEDKCILNEKFIYKKIAETTTAKESNDSNNTTNLNTSQTILPYPNGLYVINKGDGYMRTNDKDLIGTLLIETNTSGSIIQPRLRNTTRPLFNTSNPTLFSQEYTEARLNDAFNIQLFNTSTTLFKFVEEAPDNKNISMKAYNTYEKYELINYQNGNIADKAEYYLPSLGKCEVSDAPSPQAPVVETPVEQDGFIQTGPNENIIVGVINPSENIEEISTPIPDDYTYNIPTSIQNNACYVLFTVNTTGVYKINAQNNLPPLIIYESIGSDNMNIQSNTLSNNNIKAINYITGTDSSNAESYLIVSLIKNKNYYIRIPQISSSTTNQLIFKRELGNISDLANSTVNILDNLNTSGTHYYTRQSPDVGNYISYQLTIPGDFNNIASSIFSFRTRNNQGIGTLYRLTESINGYNLITIKNYSDLLNNVEPISLLNGATYIFRVKVTELNNYNIIFDAYRNS

SEQ ID NO: 74 - protein, 626 aa, Clostridium botulinum
MNSSIKKIYNDIQEKVINYSDTIDLADGNYVVRRGDGWILSRQNQILGGSVISNGSTGIVGDLRVNDNAIPYYYPTPSFNEEYIKNNIQTVFTNFTEANQIPIGFEFSKTAPSNKNLYMYLQYTYIRYEIIKVLQHEIIERAVLYVPSLGYVKSIEFNPGEKINKDFYFLTNDKCILNEQFLYKKILETTKNIPTNNIFNSKVSSTQRVLPYSNGLYVINKGDGYIRTNDKDLIGTLLIEAGSSGSIIQPRLRNTTRPLFTTSNDTKFSQQYTEERLKDAFNVQLFNTSTSLFKFVEEAPSDKNICIKAYNTYEKYELIDYQNGSIVNKAEYYLPSLGYCEVTNAPSPESEVVKMQVAEDGFIQNGPEEEIVVGVIDPSENIQEINTAISDNYTYNIPGIVNNNPFYILFTVNTTGIYKINTQNNLPPLKIYEAIGSGNRNLQAGNLCNNNIKAINYITGVDDPNTKSYLVVLLNKDKNYYIRVPQTSPNIENQIKFKREEGDLRNLMNSSVNIIDNLNSTGAHYYTRQSPDVGNYISYEFTVPGNFNNKDTSNIRLYTSNNQGIGTLFRVIETIDGYKLIGIRQNLHLLNNTNSIRLLNGAIYILKVEVTELNNYNIRLHIDITN

SEQ ID NO: 75 - protein, 626 aa, Clostridium botulinum
MNSSIKKIYNDIQEKVINYSDTIDLADGNYVVRRGDGWILSRQNQILGGSVISNGSTGIVGDLRVNDNAIPYYYPTPSFNEEYIKNNIQTVFTNFTEANQIPIGFEFSKTAPSNKNLYMYLQYTYIRYEIIKVLQHEIIERAVLYVPSLGYVKSIEFNPGEKINKDFYFLTNDKCILNEQFLYKKILETTKNIPTNNIFNSKVSSTQRVLPYSNGLYVINKGDGYIRTNDKDLIGTLLIEAGSSGSIIQPRLRNTTRPLFTTSNDTKFSQQYTEERLKDAFNVQLFNTSTSLFKFVEEAPSDKNICIKAYNTYEKYELIDYQNGSIVNKAEYYLPSLGYCEVTNAPSPESEVVKMQVAEDGFIQNGPEEEIVVGVIDPSENIQEINTAISDNYTYNIPGIVNNNPFYILFTVNTTGIYKINAQNNLPSLKIYEAIGSGNRNFQSGNLCDDDIKAINYITGFDSPNAKSYLVVLLNKDKNYYIRVPQTSSNIENQIQFKREEGDLRNLMNSSVNIIDNLNSTGAHYYTRQSPDVHDYISYEFTIPGNFNNKDTSNIRLYTSYNQGIGTLFRVTETIDGYNLINIQQNLHLLNNTNSIRLLNGAIYILKVEVTELNNYNIRLHIDITN

SEQ ID NO: 76 - protein, 442 aa, Clostridium botulinum
MNSSIKKIYNHIQEKVINYSDTIDLADGNYVVSRGDGWILSRQNQILGGSVISNGSTGIVGDLRVNDNAIPYYYPTPSFNEEYIKNNIQTVFTNFTEANQIPIGFEFSKTAPSNKNLYMYLQYTYIRYEIIKVLQHEIIERAVLYVPSLGYVKSIEFNLGEKINKDFYFLTNDKCILNEQFLYKKILETTKNIPTNNIFNSKVSSTQRVLPYSNGLYVINKGDGYIRTNDKDLIGTLLIEAGSSGSIIQPRLRNTTRPLFTTSNNTKFSQQYTEERLKDAFNVQLFNTSTSLFKFVEEAPSNKNICIKAYNTYEKYELIDYQNGSIINTAEYYLPSLGYCEVTNAPSPESEVVKTQVAEDGFVQNGPEEEIVVGVIDPSENIQEINTAISDNYTYSIPDIVDNNPFYILFTVNTTGIYKINAQNNLPPLKIYEAIGSSNKNM

SEQ ID NO: 77 - protein, 442 aa, Clostridium botulinum
MNSSIKKIYNDIQEKVINYSDTIDLADGNYVVRRGDGWILSRQNQILGGSVISNGSTGIVGDLRVNDNAIPYYYPTPSFNEEYIKNNIQTVFTNFTEANQIPIGYEFSKTAPSNKNLYMYLQYTYIRYEIIKVLQHEIIERAVLYVPSLGYVKSIEFNPGEKINKDFYFLTNDKCILNEQFLYKKILETTKNIPTNNIFNSKVSSTQRVLPYSNGLYVINKGDGYIRTNDKDLIGTLLIEAGSSGSIIQPRLRNTTRPLFTTSNDTKFSQQYTEERLKDAFNVQLFNTSTSLFKFVEEAPSDKNICIKAYNTYEKYELIDYQNGSIVNKAEYYLPSLGYCEVTNAPSPESEVVKMQVAEDGFIQNGPEEEIVVGVIDPSENIQEINTAISDNYIYSIPGIVNNNPFYILFTVNTTGIYKINAQNNLPPLKIYEAIGSGNRNM

SEQ ID NO: 78 - protein, 488 aa, Clostridium botulinum
MDSSIKKNFNNTEEETINFTAFNLDDGNYVVNRGDGWILSRQNQILGGTEVRSGSTGIVGDLRVRDNTTPYCYPTSSFNEKYIRDIVQNVFGNFNEVNQIPIGFECSRTAPDNKNLYMYLQYTYIRYEIIKVLQQQITERAVLYVPSLGYVKSIEFNSNEKIDKNFYFQVDDKCILNEQFLYKKISSTNTNKNIKNDNIDNTNSETNKTQPLVPYSNGLYVINKGDGYIRTNDRDLIGTLLIEANSSGSIIQPRLRNTTEPIFISSNLTKFSQQYTEERLKDAFNIKLFNTSTALFKFVEEAPANKNICIKAYNTYEKYELVEYRNGTIINSAQYYLPSLGYSEVIDVPSSGAPVVETPIVETQFIQKGPEEEIVIGVISPDENIQQINTAISESYTYDIPDIVGKKPFYILFTVNNTNFYKISAEDNSVPLKIYEVIGSGNRNMQDGNLSNDNIKAINYITGFDFSDKDYLIVQLFKGKNYYIRIPQ

SEQ ID NO: 79 - protein, 319 aa, Clostridium perfringens
MLSNNLNPMVFENAKEVFLISEDLKTPINITNSNSNLSDGLYVIDKGDGWILGEPSVVSSQILNPNETGTFSQSLTKSKEVSINVNFSVGFTSEFIQASVEYGFGITIGEQNTTERSVSTTAGPNEYVYYKVYATYRKYQAIRISHGNISDDGSIYKLTGIWLSKTSADSLGNIDQGSLIETGERCVLTVPSTDIEKEILDLAAATERLNLTDALNSNPAGNLYDWRSSNSYPWTQKLNLHLTITATGQKYRILASKIVDFNIYSNNFNNLVKLEQSLGDGVKDHYVDISLDAGQYVLVMKANSSYSGNYPYSILFQKF

SEQ ID NO: 80 - protein, 320 aa, Clostridium perfringens
MLSNNLNPMVFENAKEVFLISEDLKTPINITNSNSNLSDGLYVIDKGDGWILGEPSVVSSQILNPNETGTFSQSLTKSKEVSINVNFSVGFTSEFIQASVEYGFGITIGEENTIERSVSTTAGPNEYVYYKVYATYRKYQAIRISHGNISDDGSIYKLTGIWLSKTSADSLGNIDQGSLIETGERCVLTVPSTDIEKEILDLAAATERLNLTDALNSNPAGNLYDWRSSNSYPWTQKLNLHLTITATGQKYRILASKIVDFNIYSNNFNNLVKLEQSLGDGVKDHYVDISLDAGQYVLVMKANSSYSGNSHPYSILFQKF

SEQ ID NO: 81 - protein, 319 aa, Clostridium perfringens
MLSNNLNPMVFENAKEVFLISEDLKTPINITNSNSNLSDGLYVIDKGDGWILGEPSVVSSQILNPNETGTFSQSLTKSKEVSINVNFSVGFTSEFIQASVEYGFGITIGEQNTIERSVSTTAGPNEYVYYKVYATYRKYQAIRISHGNISDDGSIYKLTGIWLSKTSADSLGNIDQGSLIETGERCVLTVPSTDIEKEILDLAAATERLNLTDALNSNPAGNLYDWRSSNSYPWTQKLNLHLTITATGQKYRILASKIVDFNIYSNNFNNLVKLEQSLGDGVKDHYVDISLDAGQYVLVMKANSSYSGNYPYSILFQKF

SEQ ID NO: 82 - protein, 319 aa, Clostridium perfringens
MVSNNLNPMVFENAKEVFLISEDLKTPINITNSNSNLSDGLYVIDKGDGWILGEPSVVSSQILNPNETGTFSQSLTKSKEVSINVNFSVGFTSEFIQASVEYGFGITIGEQNTIERSVSTTAGPNEYVYYKVYATYRKYQAIRISHGNISDDGSIYKLTGIWLSKTSADSLGNIDQGSLIETGERCVLTVPSTDIEKEILDLAAATERLNLTDALNSNPAGNLYDWRSSNSYPWTQKLNLHLTITATGQKYRILASKIVDFNIYSNNFNNLVKLEQSLGDGVKDHYVDISLDAGQYVLVMKANSSYSGNYPYSILFQKF

SEQ ID NO: 83 - protein, 319 aa, Clostridium perfringens
MLSNNLNPMVFENAKEVFLISEDLKTPINITNSNSNLSDGLYVIDKGDGWILGEPSVVSSQILNPNETGTFSQSLTKSKEVSINVNFSVGFTSEFIQASVEYGFGITIGEQNTIERSVSTTAGPNEYVYYKVYATYRKYQAIRISHGNISDSGSIYKLTGIWLMKTSADSLGNIDQGSLIETGERCVLTVPSTDIEKEILDLAAATERLNLTDALNSNPAGNLYDWRSSNSYPWTQKLNLHLTITATGQKYRILASKIVDFNIYSNNFNNLVKLEQSLGDGVKDHYVDISLDAGQYVLVMKANSSYSGNYPYSILFQKF

SEQ ID NO: 84 - protein, 42 aa, Clostridium botulinum
MNSSIKKIYNHIQEKVINYSDTIDLADGNYVVSRGDGWILSR

SEQ ID NO: 85 - protein, 309 aa, Clostridium perfringens
MLSNNLNPMVFENAKEVFLISEDLKTPINITNNNLSNSNLSDGLYVIDKGDGLILGEPSVLSSQILNPNETGTFSQSLTKSKEVSINVVGFIQASVEYFTSEFTIERSVSTTAGPNEYVYYKVYATYRKYQAIRISHGNISDDGSIYKLTGIWLSKTSADSLGNIDQGSLIETGERCVLTVPSTDIEKEILDLAAATERLNLTDALNSNPAGNLYDYRSSNSYPWTQKLNLHLTITATGQKYRILASKIVDFNIYSNNFNLVKLEQSLGDGVKDHYVDLSLDAGQYVLVMKANSSYSGNYPYSILFQKF

SEQ ID NO: 86 - protein, 1197 aa, Clostridium botulinum
MNINDNLSINSPVDNKNVVVVRARKTDTIFKAFKVAPNIWVAPERYYGESLSIDEEYKVDGGIYDSNFLSQDSEKDKFLQAIITLLKRINSTNAGEKLLSLISTAIPFPYGYIGGGYYAPNMITFGSAPKSNKKLNSLISSTIPFPYAGYRETNYLSSEDNKNFYASNIVIFGPGSNIVENNTVFYKKEDAENGMGTMTEIWFQPFLTYKYDQFYIDPAIELMKCLIKSLYFLYGIKPSDDLVVPYRLRNELENIEYSQLNIVDLLVSGGIDPKFINTDPYWFIDNYFSNAKKVFEDHRNIYKTEVEGNNAIGNDIKLRLKQKFRINTNDIWELNLNYFSKEFSIMMPDRFNNALKHFYRKQYYKIDYPENYSINGFVNGQINAQLFLSDRNQDIINKPEEIINLLNGNNVSLMRSNIYGDGLKSTVDDFYSNYKIPYNRAYEYHFNNSNDSSLDNVNTGVIDNIPEIIDVNPYKENCDKFSPVQKITSTREINTNIPWPINYLQAQNTNNERFSLSSDFVEVVSSKDKSLVYSFLSNVMFYLDSIKDNSPIDTDKEYYLWLREIFRNYSFDITATQEINTNCGINKVVAWFGKALNILNTSDSFVEEFQNLGPSSLINKKENLSMPIIEIDEIPNYMLGLPLNDLNEKLFNIYLKNILYFKKVYFNFLDQWWTEYYSQYFDLICMAKQSILAQEKLIKQIIQNKLQDLSKADISMDKLNLMNLATGKTFIDLSNESQIAIDNINDFLNKSAICFFDTNIYPKFISFMEQCINSVNSNVTTFIQKCTNITEDEKLQLIKLNTFMNIDFEFFDIQNIKDLITSETDLIKEEKESDYNLFLLTLQEDNNKVIEDISGKNTLVKYSDSISLVYGVNGDALYLKEPNESVSFSNKVFENGLTNSFSICFWLRNLGEDIITSKLIENKADNCGWEIYFENNGLVFSIVDCNGNEENIYLSDVISKNWYYISISIDRLRNQLLIFINDKLIANQSIEQILNIYSSSTISLVNENNPIYVEGLSILNRSITSEEVVNNYFSYLNNSYIRDISGERLEYNKIYELYNYVFPENSLYEVTENNNIYLSIKDTNDLNIQGAKFKLINIDTNKQYVQKWDEGVVCLLGDEEKYVDISSENNRIQLVSSRDTAKKIIFNNDIFKPNCLTFAYNNKYLSLSFRDRNYNWMIYNNNDNIPKAAHLWTLKGI

SEQ ID NO: 87 - protein, 1197 aa, Clostridium botulinum; identical to SEQ ID NO: 86

SEQ ID NO: 88 - protein, 1197 aa, Clostridium botulinum
MNINDNLSINSPVDNKNVVVVRARKTDTVFKAFKVAPNIWVAPERYYGESLSIDEEYKVDGGIYDSNFLSQDSEKDKFLQAIITLLKRINSTNAGEKLLSLISTAIPFPYGYIGGGYYAPNMITFGSAPKSNKKLNSLISSTIPFPYAGYRETNYLSSEDNKSFYASNIVIFGPGANIVENNTVFYKKEDAENGMGTMTEIWFQPFLTYKYDEFYIDPAIELIKCLIKSLYFLYGIKPSDDLVIPYRLRSELENIEYSQLNIVDLLVSGGIDPKFINTDPYWFTDNYFSNAKKVFEDHRNIYETQIEGNNAIGNDIKLRLKQKFRININDIWELNLNYFSKEFSIMMPDRFNNALKHFYRKQYYKIDYPENYSINGFVNGQINVQLSLSDRNQDIINKPEEIINLLNGNNVSLMRSNIYGDGLKSTVDDFYSNYKIPYNRAYEYHFNNSNDSSLDNVNIGVIDNIPEIIDVNPYKENCDKFSPVQKITSTREINTNIPWPINYLQAQNTNNEKFSLSSDFVEVVSSKDKSLVYSFLSNVMFYLDSIKDNSPIDTDKKYYLWLREIFRNYSFDITATQEINTDCGINKVVTWFGKALNILNTSDSFVEEFQNLGPISLINKKENLSMPIIEIYGIPNDMLGLPLNDLNEKLFNIYLKNILYFKKVYFNFLDQWWTEYYSQYFDLICMAKQSILAQEKLIKQIIQNKLQDLFKADISMDKLNLMNLATEKTFIDLSNESQIAINNINDFLNKSAICVFDTNIYPKFISFMEQCINSVNSNVTAFIQKCTNITEDEKLQLIKLNTFMNIDFEFFDIQSIKDLITSETDLIKEEKESDYNLFLFTLQEDNNKVIEDISGKNTLVKYSDSISLVYGVNGDALYLKEPDESVSFSNKAFENGLTNSFSICFWLRNLGEDIITSKLIENKADNCGWEIYFENNGLVFSIVDCNGNEENIYLSDVISKNWYYISISIDRLRNQLLIFINDKLIANQSIEQILNIYSSNTISLVNENNPIYIEGLSILNRSITSEEVVNNYFSYLNNSYIRDISGERLEYNKTYELYNYVFPENSLYEVTENNNIYLSIKDTNNLNIQGAKFKLINIDANKQYVQKWDEGVVCLLGDEEKYVDISSENNRIQLVNSKDTAKRIIFNNDIFMPNCLTFAYNNKYLSLSLRDRNYNWMICNNNDNIPKAAHLWALKGI

SEQ ID NO: 89 - protein, 1197 aa, Clostridium botulinum; identical to SEQ ID NO: 88

SEQ ID NO: 90 - protein, 1198 aa, Clostridium botulinum
MNINDNLSINSPVDNKNVVVVRARKTDTVFKAFKVAPNIWVAPERYYGESLSIDEEYKVDGGIYDSNFLSQDSEKDKFLQAIITLLKRINSTNAGEKLLSLISTAIPFPYGYIGGGYYAPNMITFGSAPKSNKKLNSLISSTIPFPYAGYRETNYLSSEDNKSFYASNIVIFGPGANIVENNTVFYKKEDAENGMGTMTEIWFQPFLTYKYDEFYIDPAIELIKCLIKSLYFLYGIKPSDDLVIPYRLRSELENIEYSQLNIVDLLVSGGIDPKFINTDPYWFIDNYFSNAKKVFEDHRNIYETEIEGNNAIGNDIKLRLKQKFRININDIWELNLNYFSKEFSIMMPDRFNNALKHFYRKQYYKIDYPENYSINGFVNGQINAQLSLSDRNQDIINKPEEIINLLNGNNVSLMRSNIYGDGLKSTVDDFYSNYKIPYNRAYEYHFNNSNDSSLDNVNIGVIDNIPEIIDVNPYKENCDKFSPVQKITSTREINTNIPWPINYLQAQNTNNEKFSLSSDFVEVVSSKDKSLVYSFLSNVMFYLDSIKDNSPIDTDKKYYLWLREIFRNYSFDITATQEINTDCGINKVVTWFGKALNILNTSDSFVEEFQNLGPISLINKKENLSMPKIEIDEIPNSMLNLSFKDLSENLFNIFSKNNSYFEKIYYDFLDQWWTQYYSQYFDLICMAKRSVLAQESLIKKIIQKKLSYLIGNSNISSDNLALMNLTTTNTLRDISNESQIAMNNVNNFLNNVAICVFQTNIYPKFISFMEQCINNINKNTREFIQKCTNITENEKLQLINQNIFSSLDFDFLNIENLKSLFNSETGLLIKEETSPYELVLYAFQEPGNNAIGDASGKNTSIEYSKDIGLVYGINSDALYLNGSNQSISFSNDFFENGLTNSFSIYFWLRNLGKDTIKSKLIGSKEDNCGWEIYFQDTGLVFNMIDSNGNEKNIYLSDVSNNSWHYITISVDRLKEQLLIFIDDNLVANGSIKEILNIYSSNTISLVNENNPIYVEGLSILNRSITSEEVVNNYFTYLNNSYIRDISGERLEYNKTYELYNYVFPESSLYEVTENNNIYLSIKNTNNLNIQGAKFKLINIDANKQYVQKWDEGVVCLLGDEEKYVDISSENNRIQLVSSKDTAKRIIFNNDIFRPNCLTFAYNNKYLSLSLRDRNYNWMICNNNDNIPKAAHLWALKGI

SEQ ID NO: 91 - protein, 1198 aa, Clostridium botulinum
MNINDNLSINSPVDNKNVVVVRARKTDTVFKAFKVAPNIWVAPERYYGESLSIDEEYKVDGGIYDSNFLSQDSEKDKFLQAIITLLKRINSTNAGEKLLSLISTAIPFPYGYIGGGYYAPNMITFGSAPKSNKKLNSLISSTIPFPYAGYRETNYLSSEDNKSFYASNIVIFGPGANIVENNTVFYKKEDAENGMGTMTEIWFQPFLTYKYDEFYIDPAIELIKCLIKSLYFLYGIKPSDDLVIPYRLRSELENIEYSQLNIVDLLVSGGIDPKFINTDPYWFIDNYFSNAKKVFEDHRNIYETEIEGNNAIGNDIKLRLKQKFRININDIWELNLNYFSKEFSIMMPDRFNNALKHFYRKQYYKIDYPENYSINGFVNGQINAQLSLSDRNQDIINKPEEIINLLNGNNVSLMRSNIYGDGLKSTVDDFYSNYKIPYNRAYEYHFNNSNDSSLDNVNIGVIDNIPEIIDVNPYKENCDKFSPVQKITSTREINTNIPWPINYLQAQNTNNEKFSLSSDFVEVVSSKDKSLVYSFLSNVMFYLDSIKDNSPIDTDKKYYLWLREIFRNYSFDITATQEINTDCGINKVVTWFGKALNILNTSDSFVEEFQNLGPISLINKKENLSMPKIEIDEIPNSMLNLSFKDLSENLFNIFSKNNSYFEKIYYDFLDQWWTQYYSQYFDLICMAKRSVLAQESLIKKIIQKKLSYLIGNSNISSDNLALMNLTTTNTLRDISNESQIAMNNVNNFLNNVAICVFQTNIYPKFISFMEQCINNINKNTREFIQKCTNITENEKLQLINQNIFSSLDFDFLNIENLKSLFNSETGLLIKEETSPYELVLYAFQEPGNNAIGDASGKNTSIEYSKDIGLVYGINSDALYLNGSNQSISFSNDFFENGLTNSFSIYFWLRNLGKDTIKSKLIGSKEDNCGWEIYFQDTGLVFNMIDSNGNEKNIYLSDVSNNSWHYITISVDRLKEQLLIFIDDNLVANESIKEILNIYSSNTISLVNENNPIYVEGLSILNRSITSEEVVNNYFTYLNNSYIRDISGERLEYNKTYELYNYVFPESSLYEVTENNNIYLSIKNTNNLNIQGAKFKLINIDANKQYVQKWDEGVVCLLGDEEKYVDISSENNRIQLVSSKDTAKRIIFNNDIFRPNCLTFAYNNKYLSLSLRDRNYNWMICNNNDNIPKAAHLWALKGI

SEQ ID NO: 92 - protein, 1193 aa, Clostridium botulinum
MNINDNLSINSPVDNKNVVVVRARKTDTVFKAFKVAPNIWVAPERYYGESLSIDEEYKVDGGIYDSNFLSQDSEKDKFLQAIITLLKRINSTNAGEKLLSLISTAIPFPYGYIGGGYYAPNMITFGSAPKSNKKLNSLISSTIPFPYAGYRETNYLSSEDNKSFYASNIVIFGPGANIVENNTVFYKKEDAENGMGTMTEIWFQPFLTYKYDEFYIDPAIELIKCLIKSLYFLYGIKPSDDLVIPYRLRSELENIEYSQLNIVDLLVSGGIDPKFINTDPYWFTDNYFSNAKKVFEDHRNIYETEIEGNNAIGNDIKLRLKQKFRININDIWELNLNYFSKEFSIMMPDRFNNALKHFYRKQYYKIDYPENYSINGFVNGQINAQLSLSDRNQDIINKPEEIINLLNGNNVSLMRSNIYGDGLKSTVDDFYSNYKIPYNRAYEYHFNNSNDSSLDNVNIGVIDNIPEIIDVNPYKENCDKFSPVQKITSTREINTNIPWPINYLQAQNTNNEKFSLSSDFVEVVSSKDKSLVYSFLSNVMFYLDSIKDNSPIDTDKKYYLWLREIFRNYSFDITATQEINTNCGINKVVTWFGKALNILNTSDSFVEEFQNLGAISLINKKENLSMPIIESYEIPNDMLGLPLNDLNEKLFNIYSKNTAYFKKIYYNFLDQWWTQYYSQYFDLICMAKRSVLAQETLIKRIIQKKLSYLIGNSNISSDNLALMNLTTTNTLRDISNESQIAMNNVDSFLNNAAICVFESNIYPKFISFMEQCINNINIKTKEFIQKCTNINEDEKLQLINQNVFNSLDFEFLNIQNMKSLFSSETALLIKEETWPYELVLYAFKEPGNNVIGDASGKNTSIEYSKDIGLVYGINSDALYLNGSNQSISFSNDFFENGLTNSFSIYFWLRNLGKDTIKSKLIGSKEDNCGWEIYFQDTGLVFNMIDSNGNEKNIYLSDVSNNSWHYITISVDRLKEQLLIFIDDNLVANESIKEILNIYSSNIISLLSENNPSYIEGLTILNKPTTSQEVLSNYFEVLNNSYIRDSNEERLEYNKTYQLYNYVFSDKPICEVKQNNNIYLTINNTNNLNLQASKFKLLSINPNKQYVQKLDEVIISVLDNMEKYIDISEDNRLQLIDNKNNAKKMIISNDIFISNCLTLSYNGKYICLSMKDENHNWMICNNDMSKYLYLWSFK

SEQ ID NO: 93 - protein, 1193 aa, Clostridium botulinum
MNINDNLSINSPVDNKNVVVVRARKTDTVFKAFKVAPNIWVAPERYYGESLSIDEEYKVDGGIYDSNFLSQDSEKDKFLQAIITLLKRINSTNAGEKLLSLISTAIPFPYGYIGGGYYAPNMITFGSAPKSNKKLNSLISSTIPFPYAGYRETNYLSSEDNKSFYASNIVIFGPGANIVENNTVFYKKEDAENGMGTMTEIWFQPFLTYKYDEFYIDPAIELIKCLIKSLYFLYGIKPSDDLVIPYRLRSELENIEYSQLNIVDLLVSGGIDPKFINTDPYWFTDNYFSNAKKVFEDHRNIYETEIEGNNAIGNDIKLRLKQKFRININDIWGLNLNYFSKEFSIMMPDRFNNALKHFYRKQYYKIDYPENYSINGFVNGQINAQLSLSDRNQDIINKPEEIINLLNGNNVSLMRSNIYGDGLKSTVDDFYSNYKIPYNRAYEYHFNNSNDSSLDNVNIGVIDNIPEIIDVNPYKENCDKFSPVQKITSTREINTNIPWPINYLQAQNTNNEKFSLSSDFVEVVSSKDKSLVYSFLSNVMFYLDSIKDNSPIDTDKKYYLWLREIFRNYSFDITATQEINTNCGINKVVTWFGKALNILNTSDSFVEEFQNLGAISLINKKENLSMPIIESYEIPNDMLGLPLNDLNEKLFNIYSKNTAYFKKIYYNFLDQWWTQYYSQYFDLICMAKRSVLAQETLIKRIIQKKLSYLIGNSNISSDNLALMNLTTTNTLRDISNESQIAMNNVDSFLNNAAICVFESNIYPKFISFMEQCINNINIKTKEFIQKCTNINEDEKLQLINQNVFNSLDFEFLNIQNMKSLFSSETALLIKEETWPYELVLYAFKEPGNNVIGDASGKNTSIEYSKDIGLVYGINSDALYLNGSNQSISFSNDFFENGLTNSFSIYFWLRNLGKDTIKSKLIGSKEDNCGWEIYFQDTGLVFNMIDSNGNEKNIYLSDVSNNSWHYITISVDRLKEQLLIFIDDNLVANESIKEILNIYSSNIISLLSENNPSYIEGLTILNKPTTSQEVLSNYFEVLNNSYIRDSNEERLEYNKTYQLYNYVFSDKPICEVKQNNNIYLTINNTNNLNLQASKFKLLSINPNKQYVQKLDEVIISVLDNMEKYIDISEDNRLQLIDNKNNAKKMIISNDIFISNCLTLSYNGKYICLSMKDENHNWMICNNDMSKYLYLWSFK

SEQ ID NO: 94 - protein, 1193 aa, Clostridium botulinum
MNINDNLSINSPVDNKNVVVVRARKTDTVFKAFKVAPNIWVAPERYYGESLSIDEEYKVDGGIYDSNFLSQDSEKDKFLQAIITLLKRINSTNAGEKLLSLISTAIPFPYGYIGGGYYAPNMITFGSAPKSNKKLNSLISSTIPFPYAGYRETNYLSSEDNKSFYASNIVIFGPGANIVENNTVFYKKEDAENGMGTMTEIWFQPFLTYKYDEFYIDPAIELIKCLIKSLYFLYGIKPSDDLVIPYRLRSELENIEYSQLNIVDLLVSGGIDPKFINTDPYWFIDNYFSNAKKVFEDHRNIYETEIEGNNAIGNDIKLRLKQKFRININDIWELNLNYFSKEFSIMMPDRFNNALKHFYRKQYYKIDYPENYSINGFVNGQINAQLSLSDRNQDIINKPEEIINLLNGNNVSLMRSNIYGDGLKSTVDDFYSNYKIPYNRAYEYHFNNSNDSSLDNVNIGVIDNIPEIIDVNPYKENCDKFSPVQKITSTREINTNIPWPINYLQAQNTNNEKFSLSSDFVEVVSSKDKSLVYSFLSNVMFYLDSIKDNSPIDTDKKYYLWLREIFRNYSFDITATQEINTDCGINKVVTWFGKALNILNTSDSFVEEFQNLGPISLINKKENLSMPKIEIDEIPNSMLNLSFKDLSENLFNIFSKNNSYFEKIYYDFLDQWWTQYYSQYFDLICMAKRSVLAQESLIKKIIQKKLSYLIGNSNISSDNLALMNLTTTNTLRDISNESQIAMNNVNNFLNNVAICVFQTNIYPKFISFMEQCINNINKNTREFIQKCTNITENEKLQLINQNIFSSLDFDFLNIENLKSLFNSETGLLIKEETSPYELVLYAFQEPGNNAIGDASGKNTSIEYSKDIGLVYGINRDALYLNGSNQSISFSNDFFENGLTNSFSIYFWLRNLGKDTIKSKLIGSKEDNCGWEIYFQDTGLVFNMIDSNGNEKNIYLSDVSNNSWHYITISVDRLKEQLLIFIDDNLVANESIKEILNIYSSNTISLVNENNPIYVEGLSILNKPTTSQEVLSNYFKVLNNSYIRDSSEERLEYNKTYQLYNYVFSENPIYEIKQNNNIYLTINNTNNLNLQVSKFKLLSINPNKQYVQKLDEVIISVLDNMEKYIDISEDNRLQLIDNKNNAKKMIISNDIFISNCLIISYNGKYICLSMKDENHNWMICNNDMSKYLYLWSFK

SEQ ID NO: 95 - protein, 1198 aa, Clostridium botulinum
MKINSNLTINSPIDNKNVVIVRARETSKFFKAFKVAPNIWVAPERYYGESLSIEESKKVNGGVYDSNFLSQNNEKDKFLQAIITLLKRINSNIAGEKLLSLVSTAIPFPYGYIGGGYYCPNIVTFGSTIKYNKKINSLISTTIPFPYGGYRETNYLSSKDTENFYAANIVIFGPGANIVENNTVFYKKEDAENGMGTMAEICFQPFLTYKYDQFYVDPALELMECLIKSLYFLYGIKPNNNLTVPYRLRNELSNIEFSQLSIVDLLISGGIDSKFINTDPYWFIDSYFSNAKTTFEEHKSIYETEIKGNNAIGNDIKLRLKQKFQTTVHDIWQLNLDYFSKEFQIMMPYRFNNALKYYYRKEYYKIDYPEKYSIAGFVDGQLNTQLSLSDKNQYIINKPELIVNLISENNISLMRSNIYGDGLKYTTDNFYSTYKIPYNRAYEYHFNNSSTSSLENVNVEEISNIPEIIDINPYRENSDIFSPVENIIETKEVNTKTPWPINYLQAQIPNNEEFTLSSDFSQVVSYKTQSLVYSFLSNVISYLDSVKDTNPIDTDEKYYLWLREIFRNYSFDITAIEEINTSCGINKVVSWFGKALNILNTSNSFVKEFKNLGPISLINKKENLSMPIIEVNEIPNDMLGLSLKDLNEKLFNIYLKNILYFKKVYFSFLDQWWTEYYSQYFGLICMAKQSILAQENLIKKIVQKKLSDLSKQSNISNEKLNLMNLTTEKTFIDLSNQSQIAMNNINNFLNKAAICVFESNIYPKFISFMEQYINNINIKTTAFIRKCTNITEKEKLQLINQNTFNNLDFEFFDIQTIENLLTSETNLIIKEKTSPYDLLLFSLQEADRKVIKDISGKDTLVQYSDTIDLSYGVNGDALYLKEPNQSVNFSNNIFENGLTNSFSICFWLRNLGQDNLSSNLIGNIVNNCGWQIYFENNGLVFSMVDCNGNEKNIYLSDVLSKYWYYISVSVDRLRNKLLIFINDKLIVNESIEQILNIYSSNIISLVNENNPICIEELSILNKALTSEEVLNSYFTNLNNSYIRDSYGARLEYNKNYELYNYVFPENSLYEVIENNNMYLSIKNIKNTNILGAKFKLINTDESKQYVQKWDEVIICVLGDTEKYADIQAGNNRIQLVNSKDNARKIIVNNNIFRPNCVLFSYNNKYLSLSLRNRNYNWMICNDNSFIPKHAHLWILKKI

SEQ ID NO: 96 - protein, 1196 aa, Clostridium botulinum
MDINDDLNINSPVDNKNVVIVRARKTNTFFKAFKVAPNIWVAPERYYGEPLDIAEEYKLDGGIYDSNFLSQDSERENFLQAIITLLKRINNTISGKQLLSLISTAIPFPYGYVGGGYSSPNIFTFGKTPKSNKKLNSLVTSTIPFPFGGYRETNYIESQNNKNFYASNIVIFGPGSNIVENNVICYKKNDAENGMGTMAEILFQPLLTYKYNKFYIDPAMELTKCLIKSLYFLYGIKPSDDLVVPYRLRTELDNKQFSQLNIIDLLISGGVDLEFINTNPYWFTNSYFSNSIKMFEKYKNIYETEIEGNNAIGNDIKLRLKQKFQNSVQDIWNLNLNYFSKEFNSIIPDRFSNALKHFYRKQYYTMDYGDNYNINGFVNGQINTKLPLSDKNTNIISKPEKVVNLVNANNISLMKSNIYGDGLKGTTEDFYSTYKIPYNEEYEYRFNDSDNFPLNNISIEEVDSIPEIIDINPYKDNSDDLLFTQITSTTEEVITHTALPVNYLQAQIITNENFTLSSDFSKVVSSKDKSLVYSFLDNLMSYLETIKNDGPIDTDKKYYLWLKEVFKNYSFDINLTQEIDSSCGINEVVIWFGKALNILNTSNSFVEEYQNSGPISLISKKDNLSEPNIEIDDIPDSLLGLSFKDLNNKLYEIYSKNRVYFRKIYFNFLDQWWTEYYSQYFELICMAKQSILAQESVVKQIIQNKFTDLSKASIPPDTLKLIKETTEKTFIDLSNESQISMNRVDNFLNKASICVFVEDIYPKFISYMEKYINNINIKTREFIQRCTNINDNEKSILINSYTFKTIDFKFLNIQAIKNFFNSQVEQVMKEMLSPYQLLLFATRGPNSNIIEDISGKNTLIQYTESVELVYGVNGESLYLKSPNETVEFSNNFFTNGLTNNFTICFWLRFTGKDDDKTRLIGNKVNNCGWEIYFEDNGLVFEIIDSNGNQESVYLSNVINNNWYYISISVDRLKDQLLIFINDKNVANVSIEQILNIYSTNVISLVNKNNSIYVEELSVLDKPVASEEVIRNYFSYLDNSYIRDSSKSLLEYNKNYQLYNYVFPETSLYEVNDNNKSYLSLKNTDGINIPSVKFKLINIDESKGYVQKWDECIICVSDGTEKYLDISPENNRIQLVSSKDNAKKITVNTDLFRPDCITFSYNDKYFSLSLRDGDYNWMICNDNNKVPKGAHLWILKS

SEQ ID NO: 97 - protein, 1196 aa, Clostridium botulinum
MDINDDLNINSPVDNKNVVIVRARKTNTFFKAFKVAPNIWIAPERYYGEPLDIAEEYKLDGGIYDSNFLSQDSERENFLQAIITLLKRINNTISGKQLLSLISTAIPFPYGYVGGGYSSPNIFTFGKTPKSNKKLNSLVTSTIPFPFGGYRETNYIESPNNKDFYASNIVIFGPGSNIVENNVICYKKNDAENGMGTMAEILFQPLLTYKYNKFYIDPAMELTKCLIKSLYFLYGIKPSDGLVVPYRLRTELDNKQFSQLNIIDLLISGGVDLEFINTNPYWFTNSYFSNSIKMFEKYKNIYETEIEGNNAIGNDIKLRLRQKFQNSVQDIWNLNLNYFSKEFNSIIPDRFSNALKHFYRKQYYTMDYTDNYNINGFVNGQINTKLPLSDKNTNIISKPEKVVNLVNENNISLMKSNIYGDGLKGTTEDFYSTYKIPYNEEYEYRFNDSDNFPLNNISIEEVDSIPEIIDINPYKDNSDNLVFTQITSMTEEVTTHTALPINYLQAQITTNENFTLSSDFSKVVSSKDKSLVYSFLDNLMSYLETIKNDGPIDTDKKYYLWLKEVFKNYSFDINLTQEIDSSCGINEVVIWFGKALNILNTSNSFVEEYQNSGPISLISKKDNLSEPNIEIDDIPDSLLGLSFKDLNNKLYEIYSKNIVYFKKIYFNFLDQWWTEYYSQYFELICMAKQSILAQESLVKQIIQNKFTDLSKASIPPDTLKLIKETTEKTFIDLSKESQISMNRVDNFLNKASICVFVEDIYPKFISYMEKYINNINIKTREFIQRCTNINDNEKSILINSYTFKTIDFKFLDIQGIKNFFNSQVEQVMKEMLSPYQLLLFATRGPNSNIIEDISGKNTLIQYTESVELVYGVNGESLYLKSPNETVEFSNNFFTNGLTNNFTICFWLRFTGKDDDKTRLIGNKVNNCGWEIYFEDNGLVFEIIDSNGNQESVYLSNVINNNWYYISISVDRSKDQLLIFINDKNVANVSIEQILNIYSTNVISLVNKNNSIYVEELSVLDKTVTSEEVIRNYFSYLDNSYIRDSSKSLLEYNKNYQLYNYVFPKTSLYEVNDNNKSYLSLKNTDGINIPSVKFKLINIDESKGYVQKWDECIICVSDGTEKYLDISSENNRIQLVSSKDNAKKITVNTDLFRPDCITFSYNDKYFSLSLRDGDYNWMICNDNNKVPKGAHLWILES

SEQ ID NO: 98 - protein, 1196 aa, Clostridium botulinum
MDINDDLNINSPVDNKNVVIVRARKTNTFFKAFKVAPNIWVAPERYYGEPLDIAEEYKLDGGIYDSNFLSQDSERENFLQAIIILLKRINNTISGKQLLSLISTAIPFPYGYIGGGYSSPNIFTFGKTPKSNKKLNSLVTSTIPFPFGGYRETNYIESQNNKNFYASNIVIFGPGSNIVENNVIYYKKNDAENGMGTMAEIVFQPLLTYKYNKFYIDPAMELTKCLIKSLYFLYGIKPSDNLVVPYRLRTELDNKQFSQLNIIDLLISGGVDLEFINTNPYWFTNSYFPNSIKMFEKYKNIYKTEIEGNNAIGNDIKLRLKQKFQINVQDIWNLNLNYFCQSFNSIIPDRFSNALKHFYRKQYYTMDYTDNYNINGFVNGQINTKLPLSNKNTNIISKPEKVVNLVNENNISLMKSNIYGDGLKGTTEDFYSTYKIPYNEEYEYRFNDSDNFPLNNISIEEVDSIPEIIDINPYKDNSDNLVFTQITSMTEEVTTHTALSINYLQAQITNNENFTLSSDFSKVVSSKDKSLVYSFLDNLMSYLETIKNDGPIDTDKKYYLWLKEVFKNYSFDINLTQEIDSMCGINEVVLWFGKALNILNTSNSFVEEYQDSGAISLISKKDNLREPNIEIDDISDSLLGLSFKDLNNKLYEIYSKNIVYFKKIYFSFLDQWWTEYYSQYFELICMAKQSILAQESLVKQIVQNKFTDLSKASIPPDTLKLIRETTEKTFIDLSNESQISMNRVDNFLNKASICVFVEDIYPKFISYMEKYINNINIKTREFIQRCTNINDNEKSILINSYTFKTIDFKFLDIQSIKNFFNSQVEQVMKEILSPYQLLLFASKGPNSNIIEDISGKNTLIQYTESIELVYGVNGESLYLKSPNETIKFSNKFFTNGLTNNFTICFWLRFTGKNDDKTRLIGNKVNNCGWEIYFEDNGLVFEIIDSNGNQESVYLSNIINDNWYYISISVDRLKDQLLIFINDKNVANVSIDQILSIYSTNIISLVNKNNSIYVEELSVLDNPITSEEVIRNYFSYLDNSYIRDSSKSLLEYNKNYQLYNYVFPETSLYEVNDNNKSYLSLKNTDGINISSVKFKLINIDESKVYVQKWDECIICVLDGTEKYLDISPENNRIQLVSSKDNAKKITVNTDLFRPDCITFSYNDKYFSLSLRDGDYNWMICNDNNKVPKGAHLWILES

SEQ ID NO: 99 - protein, 1196 aa, Clostridium botulinum D phage
MDINDDLNINSPVDNKNVVIVRARKTNTFFKAFKVAPNIWVAPERYYGEPLDIAEEYKLDGGIYDSNFLSQDSERENFLQAIIILLKRINNTISGKQLLSLISTAIPFPYGYIGGGYSSPNIFTFGKTPKSNKKLNSLVTSTIPFPFGGYRETNYIESQNNKNFYASNIVIFGPGSNIVENNVIYYKKNDAENGMGTMAEIVFQPLLTYKYNKFYIDPAMELTKCLIKSLYFLYGIKPSDNLVVPYRLRTELDNKQFSQLNIIDLLISGGVDLEFINTNPYWFTNSYFPNSIKMFEKYKNIYKTEIEGNNAIGNDIKLRLKQKFQINVQDIWNLNLNYFCQSFNSIIPDRFSNALKHFYRKQYYTMDYTDNYNINGFVNGQINTKLPLSNKNTNIISKPEKVVNLVNENNISLMKSNIYGDGLKGSTEDFYSTYKIPYNEEYEYRFNDSDNFPLNNISIEEVDSIPEIIDINPYKDNSDNLVFTQITSMTEEVTTHTALSINYLQAQITNNENFTLSSDFSKVVSSKDKSLVYSFLDNLMSYLETIKNDGPIDTDKKYYLWLKEVFKNYSFDINLTQEIDSMCGINEVVLWFGKALNILNTSNSFVEEYQDSGAISLISKKDNLREPNIEIDDISDSLLGLSFKDLNNKLYEIYSKNIVYFKKIYFSFLDQWWTEYYSQYFELICMAKQSILAQESLVKQIVQNKFTDLSKASIPPDTLKLIRETTEKTFIDLSNESQISMNRVDNFLNKASICVFVEDIYPKFISYMEKYINNINIKTREFIQRCTNINDNEKSILINSYTFKTIDFKFLDIQSIKNFFNSQVEQVMKEILSPYQLLLFASKGPNSNIIEDISGKNTLIQYTESIELVYGVNGESLYLKSPNETIKFSNKFFTNGLTNNFTICFWLRFTGKNDDKTRLIGNKVNNCGWEIYFEDNGLVFEIIDSNGNQESVYLSNIINDNWYYISISVDRLKDQLLIFINDKNVANVSIDQILSIYSTNIISLVNKNNSIYVEELSVLDNPITSEEVIRNYFSYLDNSYIRDSSKSLLEYNKNYQLYNYVFPETSLYEVNDNNKSYLSLKNTDGINISSVKFKLINIDESKGYVQKWDECIICVLDGTEKYLDISPENNRIQLVSSKDNAKKITVNTDLFRPDCITFSYNDKYFSLSLRDGDYNWMICNDNNKVPKGAHLWILES

SEQ ID NO: 100 - protein, 1196 aa, Clostridium botulinum phage 1C
MDINDDLNINSPVDNKNVVIVRARKTNTFFKAFKVAPNIWVAPERYYGEPLDIAEEYKLDGGIYDSNFLSQDSERENFLQAIIILLKRINNTISGKQLLSLISTAIPFPYGYIGGGYSSPNIFTFGKTPKSNKKLNSLVTSTIPFPFGGYRETNYIESQNNKNFYASNVIIFGPGSNIVENNVIYYKKNDAENGMGTMAEIVFQPLLTYKYNKFYIDPAMELTKCLIKSLYFLYGIKPSDNLVVPYRLRTELDNKQFSQLNIIDLLISGGVDLEFINTNPYWFTNSYFPNSIKMFEKYKNIYKTEIEGNNAIGNDIKLRLKQKFQINVQDIWNLNLNYFCQSFNSIIPDRFSNALKHFYRKQYYTMDYTDNYNINGFVNGQINTKLPLSNKNTNIISKPEKVVNLVNENNISLMKSNIYGDGLKGTTEDFYSTYKIPYNEEYEYRFNDSDNFPLNNISIEEVDSIPEIIDINPYKDNSDNLVFTQITSMTEEVTTHTALSINYLQAQITNNENFTLSSDFSKVVSSKDKSLVYSFLDNLMSYLETIKNDGPIDTDKKYYLWLKEVFKNYSFDINLTQEIDSMCGINEVVLWFGKALNILNTSNSFVEEYQDSGAISLISKKDNLREPNIEIDDISDSLLGLSFKDLNNKLYEIYSKNIVYFKKIYFSFLDQWWTEYYSQYFELICMAKQSILAQESLVKQIVQNKFTDLSKASIPPDTLKLIRETTEKTFIDLSNESQISMNRVDNFLNKASICVFVEDIYPKFISYMEKYINNINIKTREFIQRCTNINDNEKSILINSYTFKTIDFKFLDIQSIKNFFNSQVEQVMKEILSPYQLLLFASKGPNSNIIEDISGKNTLIQYTESIELVYGVNGESLYLKSPNETIKFSNKFFTNGLTNNFTICFWLRFTGKNDDKTRLIGNKVNNCGWEIYFEDNGLVFEIIDSNGNQESVYLSNIINDNWYYISISVDRLKDQLLIFINDKNVANVSIDQILSIYSTNIISLVNKNNSIYVEELSVLDNPITSEEVIRNYFSYLDNSYIRDSSKSLLEYNKNYQLYNYVFPETSLYEVNDNNKSYLSLKNTDGINISSVKFKLINIDESKVYVQKWDECIICVLDGTEKYLDISPENNRIQLVSSKDNAKKITVNTDLFRPDCITFSYNDKYFSLSLRDGDYNWMICNDNNKVPKGAHLWILES

SEQ ID NO: 101 - protein, 1196 aa, Clostridium botulinum
MDINDDLNINSPVDNKNVVIVRARKTNTFFKAFKVAPNIWVAPERYYGEPLDIAEEYKLDGGIYDSNFLSQDSERENFLQAIIILLKRINNTISGKQLLSLISTAIPFPYGYIGGGYSSPNIFTFGKTPKSNKKLNSLVTSTIPFPFGGYRETNYIESQNNKNFYASNIVIFGPGSNIVENNVIYYKKNDAENGMGTMAEIVFQPLLTYKYNKFYIDPAMELTKCLIKSLYFLYGIKPSDNLVVPYRLRTELDNKQFSQLNIIDLLISGGVDLEFINTNPYWFTNSYFPNSIKMFEKYKNIYKTEIEGNNAIGNDIKLRLKQKFQINVQDIWNLNLNYFCQSFNSIIPDRFSNALKHFYRKQYYTMDYTDNYNINGFVNGQINTKLPLSNKNTNIISKPEKVVNLVNENNISLMKSNIYGDGLKGTTEDFYSTYKIPYNEEYEYRFNDSDNFPLNNISIEEVDSIPEIIDINPYKDNSDNLVFTQITSMTEEVTTHTALSINYLQAQITNNENFTLSSDFSKVVSSKDKSLVYSFLDNLMSYLETIKNDGPIDTDKKYYLWLKEVFKNYSFDINLTQEIDSMCGINEVVLWFGKALNILNTSNSFVEEYQDSGAISLISKKDNLREPNIEIDDISDSLLGLSFKDLNNKLYEIYSKNIVYFKKIYFSFLDQWWTEYYSQYFELICMAKQSILAQESLVKQIVQNKFTDLSKASIPPDTLKLIRETTEKTFIDLSNESQISMNRVDNFLNKASICVFVEDIYPKFISYMEKYINNINIKTREFIQRCTNINDNEKSILINSYTFKTIDFKFLDIQSIKNFFNSQVEQVMKEILSPYQLLLFASKGPNSNIIEDISGKNTFIQYTESIELVYGVNGESLYLKSPNETIKFSNKFFTNGLTNNFTICFWLRFTGKNDDKTRLIGNKVNNCGWEIYFEDNGLVFEIIDSNGNQESVYLSNIINDNWYYISISVDRLKDQLLIFINDKNVANVSIDQILSIYSTNIISLVNKNNSIYVEELSVLDNPITSEEVIRNYFSYLDNSYIRDSSKSLLEYNKNYQLYNYVFPETSLYEVNDNNKSYLSLKNTDGINISSVKFKLINIDESKGYVQKWDECIICVLDGTEKYLDISPENNRIQLVSSKDNAKKITVNTDLFRPDCITFSYNDKYFSLSLRDGDYNWMICNDNNKVPKGAHLWILES

SEQ ID NO: 102 - protein, 1196 aa, Clostridium botulinum
MDINDDLNINSPVDNKNVVIVRARKTNTFFKAFKVAPNIWVAPERYYGEPLDIAEEYKLDGGIYDSNFLSQDSERENFLQAIIILLKRINNTISGKQLLSLISTAIPFPYGYIGGGYSSPNIFTFGKTPKSNKKLNSLVTSTIPFPFGGYRETNYIESQNNKNFYASNIIIFGPGSNIVENNVIYYKKNDAENGMGTMAEIVFQPLLTYKYNKFYIDPAMELTKCLIKSLYFLYGIKPSDNLVVPYRLRTELDNKQFSQLNIIDLLISGGVDLEFINTNPYWFTNSYFPNSIKMFEKYKNIYKTEIEGNNAIGNDIKLRLKQKFQINVQDIWNLNLNYFCQSFNSIIPDRFSNALKHFYRKQYYTMDYTDNYNINGFVNGQINTKLPLSNKNTNIISKPEKVVNLVNENNISLMKSNIYGDGLKGTTEDFYSTYKIPYNEEYEYRFNDSDNFPLNNISIEEVDSIPEIIDINPYKDNSDNLVFTQITSMTEEVTTHTALSINYLQAQITNNENFTLSSDFSKVVSSKDKSLVYSFLDNLMSYLETIKNDGPIDTDKKYYLWLKEVFKNYSFDINLTQEIDSMCGINEVVLWFGKALNILNTSNSFVEEYQDSGAISLISKKDNLREPNIEIDDISDSLLGLSFKDLNNKLYEIYSKNIVYFKKIYFSFLDQWWTEYYSQYFELICMAKQSILAQESLVKQIVQNKFTDLSKASIPPDTLKLIRETTEKTFIDLSNESQISMNRVDNFLNKASICVFVEDIYPKFISYMEKYINNINIKTREFIQRCTNINDNEKSILINSYTFKTIDFKFLDIQSIKNFFNSQVEQVMKEILSPYQLLLFASKGPNSNIIEDISGKNTLIQYTESIELVYGVNGESLYLKSPNETIKFSNKFFTNGLTNNFTICFWLRFTGKNDDKTRLIGNKVNNCGWEIYFEDNGLVFEIIDSNGNQESVYLSNIINDNWYYISISVDRLKDQLLIFINDKNVANVSIDQILSIYSTNIISLVNKNNSIYVEELSVLDNPITSEEVIRNYFSYLDNSYIRDSSKSLLEYNKNYQLYNYVFPETSLYEVNDNNKSYLSLKNTDGINISSVKFKLINIDESKVYVQKWDECIICVLDGTEKYLDISPENNRIQLVSSKDNAKKITVNTDLFRPDCITFSYNDKYFSLSLRDGDYNWMICNDNNKVPKGAHLWILES

SEQ ID NO: 103 - protein, 1193 aa, Clostridium botulinum
MDINDDLNINSPVDNKNVVIVRARKTNTFFKAFKVAPNIWVAPERYYGEPLHIAEEYKLDGGIYDSNFLSQDSERENFLQAIIILLKRINNTISGKQLLSLISTAIPFPYGYIGGGYSSPNIFTFGKTPRTNKKLNSLVTSTIPFPFGGYRETNYIESQNNKNFYASNIIIFGPGSNIVENNVIYYKKNDAENGMGTMAEIVFQPLLTYKYNKFYIDPAMELTKCLIKSLYFLYGIKPSGNLVVPYRLRTELDNKQFSQLNIIDLLISGGVDLEFINTNPYWFTNSYFPNSIKMFEKYKNIYKTEIEGNNAIGNDIKLRLKQKFQINVQDIWNLNLNYFCQSFNSIIPDRFSNALKHFYRKQYYTMDYTDNYNINGFVNGQINTKLPLSNKNTNIISKPEKVVNLVNENNISLMKSNIYGDGLKGTTEDFYSTYKIPYDEEYEYRFNDSDNFPLNNISIEEVDSIPEIIDINPYKDNSDNLVFTQITSMTEEVTTHTALSINYLQAQITNNENFTLSSDFSKVVSSKDKSLVYSFLDNLMSYLETIKNDRPIHTDKKYYLWLKEVFKNYSFDINLTQEIDSMCGINQVVLWFGKALNILNTSNSFVEEYQDSGAISLISKKDNLREPNIEIDDISDSLLGLSFKDLNNKLYEIYSKNIVYFKKIYFSFLDQWWTQYYSQYFDLICMAKKSILAQETLIKKIIQKKLSYLIGNSNISSDNLALMNLTTTNTLRDISNESQIAMNNVDSFLNSAAICVFEGNIYPKFISFMEQCINNINKNTREFIQKCTNITENEKLQLINQNIFSSLDFDFLNIENLKSLFSSETALLIKEETSPYELVLYAFQEPDNNAIGDASAKNTSIEYSKDIDLVYGINSDALYLNGSNQSISFSNDFFENGLTNSFSIYFWLRNLGKDTIKSKLIGSKGDNCGWEIYFQDTGLVFNMIDSNGNEKNIYLSDVSNNSWHYITISVDRLKEQLLIFIDDNLVANESIKEILNIYSSNIISLLSENNPSYIEGLTILNKPTTSQEVLNNYFKVLNNSYIRDSNEERLEYNKTYQLYNYVFSDKPICEVKQNNNIYLTINNTNNLNLQPSKFKLLSINPNKQYVQKLDEVIISVLGNMEKYIDISEDNRLQLIDNKNGAKKMIISNDMFISNCLTLSCGGKYICLSMKDENHNWMICNNDMSKYLYLWSFK

SEQ ID NO: 104 - protein, 1193 aa, Clostridium botulinum
MDINDDLNINSPVDNKNVVIVRARKTNTFFKAFKVAPNIWVAPERYYGEPLHIAEEYKLDGGIYDSNFLSQDSERENFLQAIIILLKRINNTISGKQLLSLISTAIPFPYGYIGGGYSSPNIFTFGKTPRTNKKLNSLVTSTIPFPFGGYRETNYIESQNNKNFYASNIIIFGPGSNIVENNVIYYKKNDAENGMGTMAEIVFQPLLTYKYNKFYIDPAMELTKCLIKSLYFLYGIKPSGNLVVPYRLRTELDNKQFSQLNIIDLLISGGVDLEFINTNPYWFTNSYFPNSIKMFEKYKNIYKTEIEGNNAIGNDIKLRLKQKFQINVQDIWNLNLNYFCQSFNSIIPDRFSNALKHFYRKQYYTMDYTDNYNINGFVNGQINTKLPLSNKNTNIISKPEKVVNLVNENNISLMKSNIYGDGLKGTTEDFYSTYKIPYDEEYEYRFNDSDNFPLNNISIEEVDSIPEIIDINPYKDNSDNLVFTQITSMTEEVTTHTALSINYLQAQITNNENFTLSSDFSKVVSSKDKSLVYSFLDNLMSYLETIKNDRPIHTDKKYYLWLKEVFKNYSFDINLTQEIDSMCGINQVVLWFGKALNILNTSNSFVEEYQDSGAICLISKKDNLREPNIEIDDISDSLLGLSFKDLNNKLYEIYSKNIVYFKKIYFSFLDQWWTQYYSQYFDLICMAKKSILAQETLIKKIIQKKLSYLIGNSNISSDNLALMNLTTTNTLRDISNESQIAMNNVDSFLNSAAICVFEGNIYPKFISFMEQCINNINKNTREFIQKCTNITENEKLQLINQNIFSSLDFDFLNIENLKSLFSSETALLIKEETSPYELVLYAFQEPDNNAIGDASAKNTSIEYSKDIDLVYGINSDALYLNGSNQSISFSNDFFENGLTNSFSIYFWLRNLGKDTIKSKLIGSKGDNCGWEIYFQDTGLVFNMIDSNGNEKNIYLSDVSNNSWHYITISVDRLKEQLLIFIDDNLVANESIKEILNIYSSNIISLLSENNPSYIEGLTILNKPTTSQEVLNNYFKVLNNSYIRDSNEERLEYNKTYQLYNYVFSDKPICEVKQNNNIYLTINNTNNLNLQPSKFKLLSINPNKQYVQKLDEVIISVLGNMEKYIDISEDNRLQLIDNKNGAKKMIISNDMFISNCLTLSCGGKYICLSMKDENHNWMICNNDMSKYLYLWSFK

SEQ ID NO: 105 - protein, 1161 aa, Clostridium botulinum
MKINNNFNIDSPVDNKDVAIVRGRKTDIFLKVFQVAPNIWVAPERYYGESLNINEDQKSNGGIYDSNFLLTNDEKDEFLQATVKILQRINNNVIGAKLLSLISTAIPFPYEYRAEDYRQTNYLSSKDNQHYYTANLVIFGPGTNIVENNVVYYKKEDSKNGMGTMSEIWFQPFLTYKYDQFYVDPALELIKCLIKSLYYLYGIKPNDDLSIPYRLRSEFNSLEYSELDMVDFLISGGTDYKLLNTNPYWFTDNYFINAPKNFEKYKNDYETKIKNNNDIANSIKLYLEQKFKTNVQDIWELNLSYFSTEFEIMMPEIFNNALNHYHRKEYYVIDYFKNYNINGFINGQIKTILPLSKYNKNIINKPELIVNLINENNSVLMKSNIYGDGLKDTIGNFYAVYKIPYNIGDEYHINSSDSCLDNVDIKEIDNIPPINDADIYPYRKNCDPFTPVYNITETKEINTTIPFPVNYLQAQVTNSNDINLSSDFLKVISSKDRSLVYSFLDNTIDYLDSIKYDGPIDTDKKYYLWLKEIFRNYSFDITATQEINTDCGINKVVTWFGKALNILNTSDSFVEEFQNLGPISLINKKENLSMPKIEIDEIPNSMLNLSFKDLSENLFNIFSKNNSYFEKIYYDFLDQWWTQYYSQYFDLICMAKRSVLAQESLIKKIIQKKLSYLIGNSNISSDNLALMNLTTTNTLRDISNESQIAMNNVNNFLNNVAICVFQTNIYPKFISFMEQCINNINKNTREFIQKCTNITENEKLQLINQNIFSSLDFDFLNIENLKSLFNSETGLLIKEETSPYELVLYAFQEPGNNAIGDASGKNTSIEYSKDIGLVYGINSDALYLNGSNQSISFSNDFFENGLTNSFSIYFWLRNLGKDTIKSKLIGSKEDNCGWEIYFQDTGLVFNMIDSNGNEKNIYLSDVSNNSWHYITISVDRLKEQLLIFIDDNLVANESIKEILNIYSSNTISLVNENNPIYVEGLSILNKPTTSQEVLSNYFKVLNNSYIRDSSEERLEYNKTYQLYNYVFSENPIYEIKQNNNIYLTINNTNNLNLQVSKFKLLSINPNKQYVQKLDEVIISVLDNMEKYIDISEDNRLQLIDNKNNAKKMIISNDIFISNCLIISYNGKYICLSMKDENHNWMICNNDMSKYLYLWSFK

SEQ ID NO: 106 - protein, 1161 aa, Clostridium botulinum
MKINNNFNINSLVDNKDVAIVRGRKTDIFLKVFQVAPNIWVAPERYYGESLNINEDQKSNGGIYDSNFLLTNDEKDEFLQATVKILQRINNNVIGAKLLSLISTAIPFPYEYRAEDYRQTNYLSSKDNQHYYTANLVIFGPGTNIVENNVVYYKKEDSKNGMGTMSEIWFQPFLTYKYDQFYVDPALELIKCLIKSLYYLYGIKPNDDLSIPYRLRSEFNSLEYSELDMVDFLISGGTDYKLLNTNPYWFTDNYFINAPKNFEKYKNDYETKIKNNNDIANSIKLYLEQKFKTNVQDIWELNLSYFSTEFEIMMPEIFNNALNHYHRKEYYVIDYFKNYNINGFINGQIKTILPLSKYYKNIINKPELIVNLINENNSVLMKSNIYGDGLKDTIGNFYAVYKIPYNIGDEYHINSSDSCLDNVDIKEINNIPPINDADIYPYRKNCDPFTPVYNITETKEINTTIPFPVNYLQAQVTNSNDINLSSDFLKVISSKDRSLVYSFLDNTIDYLDSIKYDGPIDTDKKYYLWLKEIFRNYSFDITATQEINTDCGINKVVTWFGKALNILNTSDSFVEEFQNLGPISLINKKENLSMPKIEIDEIPNSMLNLSFKDLSENLFNIFSKNNSYFEKIYYDFLDQWWTQYYSQYFDLICMAKRSVLAQESLIKKIIQKKLSYLIGNSNISSDNLALMNLTTTNTLRDISNESQIAMNNVNNFLNNVAICVFQTNIYPKFISFMEQCINNINKNTREFIQKCTNITENEKLQLINQNIFSSLDFDFLNIENLKSLFNSETGLLIKEETSPYELVLYAFQEPGNNAIGDASGKNTSIEYSKDIGLVYGINRDALYLNGSNQSISFSNDFFENGLTNSFSIYFWLRNLGKDTIKSKLIGSKEDNCGWEIYFQDTGLVFNMIDSNGNEKNIYLSDVSNNSWHYITISVDRLKEQLLIFIDDNLVANESIKEILNIYSSNTISLVDENNPIYVEGLSILNKPTTSQEVLSNYFKVLNNSYIRDSSEERLEYNKTYQLYNYVFSENPIYEIKQNNNIYLTINNTNNLNLQVSKFKLLSINPNKQYVQKLDEVIISVLDNMEKYIDISEDNRLQLIDNKNNAKKMIISNDIFISNCLIISYNGKYICLSMKDENHNWMICNNDMSKYLYLWSFK

SEQ ID NO: 107 - protein, 1163 aa, Clostridium botulinum
MKINNNFNIDSPVDNKDVAIVRGRKTDIFLKVFQVAPNIWVAPERYYGESLNINEDQKSDGGIYDSNFLLTNDEKDEFLQATVKILQRINNNVIGAKLLSLISTAIPFPYEYKPGDYRQTNYLVSKDNQHYYTANLVIFGPGTNIVENNAVYYKKEDSENGMGTMSEIWFQPFLTYKYDQFYVDPALELIKCLIKSLYYLYGIKPSDDLSIPYRLRSELNSLKYSELDMVDFLISGGTDYKLLNTNPYWVTDNYFSDAPKNFEKYKNDYETKIKNNNDIANSIKLYLEQKFKINAQDIWELNLSYLSTEFEIMMPEIFNNALNHYHRKEYYVIDYFKNYNINGFINGQIKTILPLSKYNKNIINKPELIVNLINENNSVLMKSNVYGDGLKGTMNNFYAVYKIPYNIGDEYHINYSYLNNVNVEEINNIPPINDADIYPYRKNSDPFIPVYNITETKEINTTTPLSVNYLQAQVTNSNDINLSLDFSKVISLKDRSLVYSFLDNTIDYLDSIKYDEPINTDKKYYLWLKEIFRNYSFDMTEIQEVNIPCGINKVVPWLGKALNILNTGNSFIEEFKTLGPISLINKKENIIMPKIEIDEIPNSMLNLSFKDLSENLFNIFSKNNSYFEKIYYDFLDQWWTQYYSQYFDLICMAKRSVLAQESLIKKIIQKKLSYLIGNSNISADNLVLMNLTTTNTLRDISNESQIAMNNVDSFLNSAAICVFEGNIYPKFISFMEQCINNINKNTREFIQKCTNITENEKLQLINRNIFSSLDFDFLNIENLKSLFSSETALLIKEETSPYELVLYAFQEPDNNAIGDASAKNTSIEYSKDIDLVYGINGDALYLNGANQSISFSNDFFENGLTNSFSIYFWLRNLGKDTIKSKLIGSKEDNCGWEIYFQDTGLVFNMIDSNGNEKNIYLSDVSNNSWHYITISIDRLKEQLLIFIDDNLVVNESIKEILNIYSSNIISLLSNNNASYIEGLTILNKPTTSQEVLSNYFKNLNNSYIRDSNEERLEYNKTYQLYNYVFSENPIYEIKQNNNIYLTINNTNNLNLQASKFKLLSINPNKQHVQKFDEVIISILDNMEKYIDISEDNRLQLIDNKNGAKKMIISNNIFISNCLTLSCGGKYICLSMKDENYNWMICNNESNIPKKAYLWTLKEV

SEQ ID NO: 108 - protein, 1159 aa, Clostridium botulinum
MKINNNFNIDSLIDNRDVAIVRGRKTDTFFKVFQVAPNIWIAPERYYGESLNINEDQKSDGGIYDSNFLSTNDEKDEFLQATVKILQRINNNVIGAKLLSLISTAIPFPYEYKPGDYRQTNYLVSKDNQHYYTANLVIFGPGTNIVENNAIYYKKEDSENGMGTMSEIWFQPFLTYKYGQFYVDPALELIKCLIKSLYYLYGIKPSDDLSIPYRLRSELNSFEYSELDMIDFLISGGTEYKLLDTNPYWFTDNYFIDAPKNFEKYKNDYETKIKNNNDIANSIKLYLEQKFKTNAQDIWELNLSYFSTEFEIMMPEIFNNALNHYYRKEYYVIDYFKNYNINGFINGQIKTILPLSKYNKNIINKPELVVNLINENNTVLMKSNVYGDGLKGTMDNFYAAYKIPYNIGDEYHINYSYLNNVNVEEINNIPPINDADIYPYRKNSDPFIPVYNITETKEINTTTPLSVNYLQAQVTNSNDISLSSDFSKVISSKDRSLVYSFLDNTIDYLDSIKYDEPIDTDKKYYLWLKEIFRNYSFDMTETQEVNTPCGINKVVPWLGKALNILNTGNSFIEEFKSLGPISLINKKENITMPKIEIDEIPNSMLNLSFKDLSENLFNRFSKNNSYFEKIYYDFLDQWWTQYYSQYFDLICMAKKSILAQETLIKKIIQKKLSYLIGNSNISSDNLALMNLTTTNTLRDISNESQIAMNNVDSFLNSAAICVFEGNIYSKFISFMEQCINNINKNTREFIQKCTNITENEKLQLINQNIFSSLDFDFLNIENLKSLFSSETALLIKEETSPYELVLYAFQEPDNNAIGDASAKNTSIEYSKDIDLVYGINSDALYLNGSNQSISFSNDFFENGLTNSFSIYFWLRNLGKDTIKYKLIGSKEDNCGWEIYFQDTGLVFNMIDSNGNEKNIYLSDVSNNSWHYITISVDRLKEQLLIFIDDNLVANESIKEILNIYSSNIISLLSENKPSYIEGLTILNKPTTSQEVLNNYFKVLNNSYIRDSNEERLEYHKTYQLDNYVFSDKPICEVKQNNNIYLTINNTNNLNLQPSKFKLLSINSNKQYVQKFDEVIISILGNMEKYIDISEDNRLQLIDNKNGAKKMIISNDMFISNCLTLSCGGKYICLSMKDENHNWMICNNDMSKYLYLWSFK

SEQ ID NO: 109 - protein, 1165 aa, Clostridium botulinum
MKINDDLNINSPVDNKNVVIVRARKTNIFFKAFQVAPNIWVAPERYYGEPLNISDQEKSDGGIYDENFLKENSEKEEFLQAIILLLKRINNNIIGQKLLSLMCTSIPFLHEYKQGDYRQSNYLGSKNSEYLYSANIVIFGPGSNIVKNNTIYYKKNFAENGMGTMAEILFQPLLTYKYNQFYADPALELIKCLIKAIYFLYGIKPNDNLNIPYRLRNEFSNVEYSELNIIDFLISGGIDYKFINTNPYWFIDNYFIDVPKVFEKHKNDYEINIKNNSEIGTSIKLYLEQKFKTNVQDIWELNLSYFSKEFQIMMPEKHNNALKHYYRKEYYKINYSKQYDINGFVNGQIATKLLLSEKNQYIINKPQLIINLINKSNNSLLMKSNIYGDGLNGTTDNFYRNYKIPDNIAYQYHPNNTYLDNVNIEEINNIPQITDADIYPYTNNCDTFIPIYNITQSREINTTVPYSINYLQSQIMNSDDITLSSDFWEVVCSNDKSLVYSYLDNVINYLDSIKNNTPINTDKKYYLWLKEIFRNYSFDITATEEITTECGINKIVSWFGKALNILNTDNSFKIEFQNSGAIALINKKDNIIIPKIEIDEMPNSMLNLSFEDLNEQLYSIYSKNITYFKKIYYNFLDQWWTEYYSQYFDLICMAKKSILAQENLIKKIIQKKISYLIGASNIPDDILAVMRLTTTNTLRDISVESQIAMNNLNNFLNKAAMCVFQSNIYPKFISFMEQCIKHINKSTKEFIQKCTNINETEKLQLIMQNSFSNLDFDFLDIQNMKNLFNSYTELLIKEQTSPYELSLYAFEEQDNNVIGDASGKNTLVEYPKGIELVYGINNSALYLNGSNQSIIFTNDYFENGLTNSFSIYFWLRNLGQDTIKSKLIGSKEYNCGWEIYFQEIGHVFNMIDSNGNEKNIYLSDVSNNSWHYITISVDRLKEQLLIFIDDNLVVNESIKDILNIYSSNIISLLSDNKASYIEGLTILNKPTTGEEVLRNYFKNLNNSYVRDSNDERLEYNKTYQLYDYVFPDNPICEVKQDNNIYLTINNINNLNMKPCKFKLLSINSNKQYVQKWDEVIISVLYDTEKYVCISNENNRVKIIDNKIMQVKFIISNDIFISNCLTHAHNNKYICLSMKDENYNWMICNNESNIPKKAYLWILKEV

SEQ ID NO: 110 - protein, 1165 aa, Clostridium botulinum
MKINDDLNINSPVDNKNVVIVRARKTNIFFKAFQVAPNIWVAPERYYGEPLNISDQEKSDGGIYDENFLKENSEKEEFLQAIILLLKRINNNIIGQKLLSLMCTSIPFLHEYKQGDYRQSNYLGSKNSEYLYSANIVIFGPGSNIVKNNTIYYKKNFAENGMGTMAEILFQPFLTYKYNQFYADPALELIKCLIKAIYFLYGIKPNDNLNIPYRLRNEFSNVEYSELNIIDFLISGGIDYKFINTNPYWFIDNYFIDVPKVFEKHKNDYEINIKNNSEIGTSIKLYLEQKFKTNVQDIWELNLSYFSKEFQIMMPEKHNNALKHYYRKEYYKINYSKQYDINGFVNGQIATKLLLSEKNQYIINKPQLIINLINKSNNSLLMKSNIYGDGLNGTTDNFYRNYKIPDNIAYQYHPNNTYLDNVNIEEINNIPQITDADIYPYTNNCDTFIPIYNITQSREINTTVPYSINYLQSQIMNSDDITLSSDFWEVVCSNDKSLVYSYLDNVINYLDSIKNNTPINTDKKYYLWLKEIFRNYSFDITATEEITTECGINKIVSWFGKAFNILNTDNSFKIEFQNSGAIALINKKDNIIIPKIEIDEMPNSMLNLSFEDLNEQLYSIYSKNITYFKKIYYNFLDQWWTEYYSQYFDLICMAKKSILAQENLIKKIIQKKISYLIGASNIPDDILAVMRLTTTNTLRDISVESQIAMNNLNNFLNKAAMCVFQSNIYPKFISFMEQCIKHINKSTKEFIQKCTNINETEKLQLIMQNSFSNLDFDFLDIQNMKNLFNSYTELLIKEQTSPYELSLYAFEEQDNNVIGDASGKNTLVEYPKGIELVYGINNSALYLNGSNQSIIFTNDYFENGLTNSFSIYFWLRNLGQDTIKSKLIGSKEYNCGWEIYFQEIGHVFNMIDSNGNEKNIYLSDVSNNSWHYITISVDRLKEQLLIFIDDNLVVNESIKDILNIYSSNIISLLSDNKASYIEGLTILNKPTTGEEVLRNYFKNLNNSYVRDSNDERLEYNKTYQLYDYVFPDNPICEVKQDNNIYLTINNINNLNMKPCKFKLLSINSNKQYVQKWDEVIISVLYDTEKYVCISNENNRVKIIDNKIMQVKFIISNDIFISNCLTHAHNNKYICLSMKDENYNWMICNNESNIPKKAYLWILKEV

SEQ ID NO: 111 - protein, 1162 aa, Clostridium botulinum
MKINNNFNINSLVDNRDVAIVRGRKTDALFKVFQVAPNIWIAPERYYGESLNINEDQKSDGGIYDSSFLSTDNEKDEFLQATVKILQRINNNVIGAKLLSLISTAISFPYEYKPGDYRQTNYLTSKYNEHYYTANLVIFGPGSNIIKNNVVYYKKEYAENGMGTMSEIWFQPFLTYKYDQFYVDPALELIKCLIKSLYYLYGIKPSDDLSIPYRLRSELNNSEYSQLDIVDFLISGGTDYKLLNTNPYWITDNYFSDAPKNFEKYKNDYETKIKNNNDIANSIKLYLEQKFKINAQNIWELNLSYFSKEFQIMMPERYNNALNHYYKKEYYGIDYFRNYNINGFEKGQIKTNLPLSKYNKCIINKPELIVNLINQNNTVWMKSNIYGDGLKCTIDNFYSSYKIPYNANYEHPINYSYLDNVNIEEIDKIPPINDADIYPYRKNADTFIPVYNIIKSKEVNTTTPLPVNYLQVQITDSNDINLSSDFLEVISSKGSSVYSFLNNTMDYLESIKYDKPIDTDKKYYKWLKAIFRNYSFDITETQEISNQFGVTKIVPWIGRALNILNTNNSFMEEFKNLGPISLINKKENITMPKIEIDEIPNSMLNLSFKDLSENLFNISFKSNSYFKKIYYDFLDQWWTQYYSQYFDLICMAKKSILAQEKLIKKIIRKKLSYLIGNANISSDNLALMNLTTTNTLRDISNESQIAMNNVDSFLNDAAICVFESNIYPKFISFMEQCINNINKDTKEFIQKCTNITENEKLQLISPNIFSSLDFDFLNIENLKSLLSSETALLIKEETSPYELVLYAFQELSNNVIGDASGKNTSIEYSKDIGLVYGINSDALYLNGSNQSISFSNDFFENGLTNSFSIHFWLRNLGQDTTKSKLIGSKEDNCGWEIYFQNTGLVFNMIDSNGDEKNIYLSDVSNNSWHYITISVDRLKEQLLIFIDDNLVVNESIKEILNIYSSNIISLLSDNNASYIEGLTILNKPTTGEEVLSNYFKNLNNSYIRDSNEERLEYNKTYQLYNYVFSDKPICEVKQNNNIYLTINNTNNLNLQASKFKLLSINPNKQYVQKFDEVIISVLDNMEKYIDISEDNRLQLIDNKNSAKKMIISNDIFISNCLTLSYGDKYVCLSMKDENYNWMICNNESNIPKKAYLWILKEV

SEQ ID NO: 112 - protein, 1160 aa, Clostridium barati
MKINNNFNIDSPVDNKNVAVVRGRKTDSFFKAFQVAPNIWIAPERYYGESLNINEDQKSDGGIYDSNFLSTDDEKDEFLQATIKILQRINNNIVGEKLLSLIATAMPFPYEYGAEDFRQTNYLSSKDNKYYYPANLVIFGPGSNLIENSVVCYKKEYSENGMGTMCEVWFQPFLTYKYDQFYNDPALELIKCLIKSLYYLYGIKPSDDLSIPYRLRSEFNYLEYSELDIIDFLISGGNDYKFLNTNPYWLTSDYFINASKNFEKYKNYYETKVKNNNDISNSIKLYLEQKFKTNVQDIWELNLSYFSKEFQIMMPERYNNALNHYYKKEYYMIDYFKNYNISGFVNGQINTRLPLSKYNKDIISKPELIVNLINENNTILMKSNIYGDGLKDTRTNFYSNYKIPYSTNYEYQINHSYLNNVNIEEISNIPPIDDKDIYPYRKNADSFIPVYSIASTKEITTTPLPINYLQAQMTNNNIKLSLDFLEVISSKGSLVYSFLNNTIDYLDSIKYDKPINTAERYYEWLKSIFRNYSFDITETQEINTSCGTTKVVPWIGKALNILNTNNSFVEEFEKLGPISLINKKENITMPKIEIDEIPNSMLNLSFNDLSNNLFNIYAKNNSYFKKIYYNFLDQWWTQYYSQYFYLICMGKKSVLAQEKLIKEIIQKQLNYLIRNSNISSSDLALMNLTTTNTLRDISNKSQIAMNNIDDFFNNAAICVFQSNIYPKFISFMQQCINGINENTKYFIQKCTNVTEDEKLQLIMQNSLNSLNFDFLDIEKIKCLFNSYTRLLIKKQSSPYELSLYAFQGEDKNVIGDGSGKNTLVEYTNDIGLIYGINNNALYLNQSNQSVSFTNDYFENGLTNSFSIYFWLRNLGKDIIKSKLISSKLDNCGWEIYLEDNGLVFNIIDSNGSYKKIYISDMNNSWNYIAISVDRLKEQLLIFVNDVLVANEDIKDILNIYSSNTISLVSENNQICIEGLSILNTNITKEEVLNNYFADLNNSYIRNGNEERLEYNKKYNLFNYVFSKTPICKVNHNNKIYLSINNDDNLNVKPLSFMLLSVDSNKKYVQKCDEVIISILDDKERYLCKSNEDNRIEIVDNKSSANIFIINNDIFISNCLTLKFNNKFIYLSEKYMNYNWIECENKYTIPKKAYLWILKNI

SEQ ID NO: 113 - protein, 1162 aa, Clostridium botulinum
MKINGNLNIDSPVDNKNVAIVRSRNQMFFKAFQVAPNIWIVPERYYGESLKINEDQKFDGGIYDSNFLSTNNEKDDFLQATIKLLQRINNNVVGAKLLSLISTAIPFPYENNTEDYRQTNYLSSKNNEHYYTANLVIFGPGSNIIKNNVIYYKKEYAESGMGTMLEIWFQPFLTHKYDEFYVDPALELIKCLIKSLYYLYGIKPNDNLNIPYRLRNEFNSLEYSELNMIDFLISGGIDYKLLNTNPYWFIDKYFIDTSKNFEKYKNDYEIKIKNNNYIANSIKLYLEQKFKINVKDIWELNLSYFSKEFQIMMPERYNNALNHYYRKEFYVIDYFKNYNINGFKNGQIKTKLPLSKYNKEIINKPELIVNLINQNNTVLMKSNIYGDGLKGTVDNFYSNYIIPYNLNYEHSINYFYLDNVNIEEIEKIPPINDEDIYPYRKNADTFIPVYNITKAKEINTTTPLPVNYLQAQMIDSNDINLSSDFLKVISSKGSLVYSFLNNTMDYLEFIKYDKPIDTDKKYYKWLKAIFRNYSLDITETQEISNQFGDTKIIPWIGRALNILNTNNSFVEEFKNLGPISLINKKENITIPKIKIDEIPSSMLNFSFKDLSENLFNIYCKNNFYLKKIYYNFLDQWWTQYYSQYFDLICMASKSVLAQEKLIKKLIQKQLRYLMENSNISSTNLILINLTTTNTLRDISNQSQIAINNIDKFFNNAAMCVFENNIYPKFTSFMEQCIKNINKSTKEFILKCTNINETEKSHLIMQNSFSNLDFDFLDIQNMKNLFNLYTELLIKEQTSPYELSLYAFQEQDNNVIGDTSGKNTLVEYPKDIGLVYGINNNAIHLTGANQNIKFTNDYFENGLTNNFSIYFWLRNLKQNTIKSKLIGSKEDNCGWEIYFENDGLVFNIIDSNGNEKNIYLSNISNKSWHYIVISINRLKDQLLIFIDNILVANEDIKEILNIYSSDIISLLSDNNNVYIEGLSVLNKTINSNEILTDYFSDLNNSYIRNFDEEILQYNRTYELFNYVFPEIAINKIEQNNNIYLSINNENNLNFKPLKFKLLNTNPNKQYVQKWDEVIFSVLDGTEKYLDISTTNNRIQLVDNKNNAQIFIINNDIFISNCLTLTYNNVNVYLSIKNQDYNWVICDLNHDIPKKSYLWILKNI

SEQ ID NO: 114 - protein, 1162 aa, Clostridium botulinum
MKINGNLNIDSPVDNKNVAIVRSRNQMFFKAFQVAPNIWIVPERYYGESLKINEDQKFDGGIYDSNFLSTNNEKDDFLQATIKLLQRINNNVVGAKLLSLISTAIPFPYENNTEDYRQTNYLSSKNNEHYYTANLVIFGPGSNIIKNNVIYYKKEYAESGMGTMLEIWFQPFLTHKYDEFYVDPALELIKCLIKSLYYLYGIKPNDNLNIPYRLRNEFNSLEYSELNMIDFLISGGIDYKLLNTNPYWFIDKYFIDTSKNFEKYKNDYEIKIKNNNYIANSIKLYLEQKFKINVKDIWELNLSYFSKEFQIMMPERYNNALNHYYRKEFYVIDYFKNYNINGFKNGQIKTKLPLSKYNKEIINKPELIVNLINQNNTVLMKSNIYGDGLKGNVDNFYSNYIIPYNLNYEHSINYFYLDNVNIEEIEKIPPINDEDIYPYRKNADTFIPVYNITKAKEINTTTPLPVNYLQAQMIDSNDINLSSDFLKVISSKGSLVYSFLNNTMDYLEFIKYDKPIDTDKKYYKWLKAIFRNYSLDITETQEISNQFGDTKIIPWIGRALNILNTNNSFVEEFKNLGPISLINKKENITIPKIKIDEIPSSMLNFSFKDLSENLFNIYCKNNFYLKKIYYNFLDQWWTQYYSQYFDLICMASKSVLAQEKLIKKLIQKQLRYLMENSNISSTNLILINLTTTNTLRDISNQSQIAINNIDKFFNNAAMCVFENNIYPKFTSFMEQCIKNINKSTKEFILKCTNINETEKSHLIMQNSFSNLDFDFLDIQNMKNLFNLYTELLIKEQTSPYELSLYAFQEQDNNVIGDTSGKNTLVEYPKDIGLVYGINNNAIHLTGANQNIKFTNDYFENGLTNNFSIYFWLRNLKQNTIKSKLIGSKEDNCGWEIYFENDGLVFNIIDSNGNEKNIYLSNISNKSWHYIVISINRLKDQLLIFIDNILVANEDIKEILNIYSSDIISLLSDNNNVYIEGLSVLNKTINSNEILTDYFSDLNNSYIRNFDEEILQYNRTYELFNYVFPEIAINKIEQNNNIYLSINNENNLNFKPLKFKLLNTNPNKQYVQKWDEVIFSVLDGTEKYLDISTTNNRIQLVDNKNNAQIFIINNDIFISNCLTLTYNNVNVYLSIKNQDYNWVICDLNHDIPKKSYLWILKNI

SEQ ID NO: 115 - protein, 1162 aa, Clostridium butyricum
MKINGNLNIDSPVDNKNVAIVRSRNQMFFKAFQVAPNIWIAPERYYGESLKINEDQKSDGGIYDSNFLSTNNEKDEFLQATIKLLQRINNNVVGAKLLSLISTAIPFPYENNTEDYRQTNYLSSKNNEHYYTANLVIFGPGSNIIKNNVIYYKKEYAENGMGTMLEIWFQPFLTHKYDEFYVDPALELIKCLIKSLYYLYGIKPNDNLNIPYRLRNEFNSLEYSELDMIDFLISGGIDYKLLNTNPYWFIDKYFIDTSKNFEKYKNDYEIKIKNNNYIANSIKLYLEQKFKINVKDIWELNLSYFSKEFQIMMPERYNNALNHYYRKEFYVIDYFKNYNINGFKNGQIKTKLPLSKYNKEIINKPELIVNLINQNNTVLMKSNFYGDGLKGNVDNFYSNYIIPYNLNYEHSINYSYLDNVNIEEIEKIPPINDEDIYPYRKNADTFIPVYNITKAKEINTTTPLPVNYLQAQMIDSNDINLSSDFLKVISSKGSLVYSFLNNTMDYLEFIKYDKPIDTDKKYYKWLKAIFRNYSLDITETQEISNQFGDTKIIPWIGRALNILNTNNSFVEEFKNLGPIFLINKKENITIPKIKIDEIPSSMLNFSFKDLSENLFNIYCKNNFYLKKIYYNFLDQWWTQYYSQYFDLICMASKSVLAQEKLIKKLIQKQLRYLMENSNISSTNLILINLTTTNTLRDISNQSQIAINNIDKFFNNAAMCVFENNIYPKFTSFMEQCIKNINKSTKEFILKCTNINETEKSHLIMQNSFSNLDFDFLDIQNMKNLFNLYTELLIKEQTSPYELSLYAFQEQDNNVIGDTSGKNTLVEYPKDIGLVYGINNNAIHLTGANQNIKFTNDYFENGLTNNFSIYFWLRNLNQNTIKSKLIGSKEDNCGWEIYFENNGLVFNIIDSNGNEKNIYLSNISNKSWHYIVISINRLKDQLLIFIDNILVANEDIKEILNIYSSDIISLLSDNNNVYIEGLSVLNKTINSNEILTDYFSDLNNSYIRNFDEEILQYNRTYELFNYVFPEIAINKIEQNNNIYLSNNNENSLNFKPLKFKLLNTNPNKQYVQKWDEVIFSVLDGTEKYLDISIDNNRIQLVDNKNNAKTFIINNDIFISNCLTLTYNNVNVYLSIKNQDYNWVICDLNHDIPKKSYLWILKNI

SEQ ID NO: 116 - protein, 197 aa, Clostridium botulinum
MNINDNLSINSPVDNKNVVVVRARKTDTVFKAFKVAPNIWVAPERYYGESLSIDEEYKVDGGIYDSNFLSQDSEKDKFLQAIITLLKRINSTNAGEKLLSLISTAIPFPYGYIGGGYYAPNMITFGSAPKSNKKLNSLISSTIPFPYAGYRETNYLSSEDNKSFYASNIVIFGPGANIVENNTVFYKKEDAENGMGT

SEQ ID NO: 117 - protein, 1291 aa, Clostridium botulinum
MPVTINNFNYNDPIDNDNIIMMEPPFARGTGRYYKAFKITDRIWIIPERYTFGYKPEDFNKSSGIFNRDVCEYYDPDYLNTNDKKNIFFQTLIKLFNRIKSKPLGEKLLEMIINGIPYLGDRRVPLEEFNTNIASVTVNKLISNPGEVERKKGIFANLIIFGPGPVLNENETIDIGIQNHFASREGFGGIMQMKFCPEYVSVFNNVQENKGASIFNRRGYFSDPALILMHELIHVLHGLYGIKVDDLPIVPNEKKFFMQSTDTIQAEELYTFGGQDPSIISPSTDKSIYDKVLQNFRGIVDRLNKVLVCISDPNININIYKNKFKDKYKFVEDSEGKYSIDVESFNKLYKSLMLGFTEINIAENYKIKTRASYFSDSLPPVKIKNLLDNEIYTIEEGFNISDKNMGKEYRGQNKAINKQAYEEISKEHLAVYKIQMCKSVKVPGICIDVDNENLFFIADKNSFSDDLSKNERVEYNTQNNYIGNDFPINELILDTDLISKIELPSENTESLTDFNVDVPVYEKQPAIKKVFTDENTIFQYLYSQTFPLNIRDISLTSSFDDALLVSSKVYSFFSMDYIKTANKVVEAGLFAGWVKQIVDDFVIEANKSSTMDKIADISLIVPYIGLALNVGDETAKGNFESAFEIAGSSILLEFIPELLIPVVGVFLLESYIDNKNKIIKTIDNALTKRVEKWIDMYGLIVAQWLSTVNTQFYTIKEGMYKALNYQAQALEEIIKYKYNIYSEEEKSNININFNDINSKLNDGINQAMDNINDFINECSVSYLMKKMIPLAVKKLLDFDNTLKKNLLNYIDENKLYLIGSVEDEKSKVDKYLKTIIPFDLSTYSNIEILIKIFNKYNSEILNNIILNLRYRDNNLIDLSGYGAKVEVYDGVKLNDKNQFKLTSSADSKIRVTQNQNIIFNSMFLDFSVSFWIRIPKYRNDDIQNYIHNEYTIINCMKNNSGWKISIRGNRIIWTLIDINGKTKSVFFEYNIREDISEYINRWFFVTITNNLDNAKIYINGTLESNMDIKDIGEVIVNGEITFKLDGDVDRTQFIWMKYFSIFNTQLNQSNIKEIYKIQSYSEYLKDFWGNPLMYNKEYYMFNAGNKNSYIKLVKDSSVGEILIRSKYNQNSNYINYRNLYIGEKFIIRRESNSQSINDDIVRKEDYIHLDLVLHHEEWRVYAYKYFKEQEEKLFLSIISDSNEFYKTIEIKEYDEQPSYSCQLLFKKDEESTDDIGLIGIHRFYESGVLRKKYKDYFCISKWYLKEVKRKPYKSNLGCNWQFIPKDEGWTE

SEQ ID NO: 118 - protein, 1291 aa, Clostridium botulinum; identical to SEQ ID NO: 2

SEQ ID NO: 119 - protein, 1290 aa, Clostridium botulinum
PVTINNFNYNDPIDNNNIIMMEPPFARGTGRYYKAFKITDRIWIIPERYTFGYKPEDFNKSSGIFNRDVCEYYDPDYLNTNDKKNIFLQTMIKLFNRIKSKPLGEKLLEMIINGIPYLGDRRVPLEEFNTNIASVTVNKLISNPGEVERKKGIFANLIIFGPGPVLNENETIDIGIQNHFASREGFGGIMQMKFCPEYVSVFNNVQENKGASIFNRRGYFSDPALILMHELIHVLHGLYGIKVDDLPIVPNEKKFFMQSTDAIQAEELYTFGGQDPSIITPSTDKSIYDKVLQNFRGIVDRLNKVLVCISDPNININIYKNKFKDKYKFVEDSEGKYSIDVESFDKLYKSLMFGFTETNIAENYKIKTRASYFSDSLPPVKIKNLLDNEIYTIEEGFNISDKDMEKEYRGQNKAINKQAYEEISKEHLAVYKIQMCKSVKAPGICIDVDNEDLFFIADKNSFSDDLSKNERIEYNTQSNYIENDFPINELILDTDLISKIELPSENTESLTDFNVDVPVYEKQPAIKKIFTDENTIFQYLYSQTFPLDIRDISLTSSFDDALLFSNKVYSFFSMDYIKTANKVVEAGLFAGWVKQIVNDFVIEANKSNTMDKIADISLIVPYIGLALNVGNETAKGNFENAFEIAGASILLEFIPELLIPVVGAFLLESYIDNKNKIIKTIDNALTKRNEKWSDMYGLIVAQWLSTVNTQFYTIKEGMYKALNYQAQALEEIIKYRYNIYSEKEKSNINIDFNDINSKLNEGINQAIDNINNFINGCSVSYLMKKMIPLAVEKLLDFDNTLKKNLLNYIDENKLYLIGSAEYEKSKVNKYLKTIMPFDLSIYTNDTILIEMFNKYNSEILNNIILNLRYKDNNLIDLSGYGAKVEVYDGVELNDKNQFKLTSSANSKIRVTQNQNIIFNSVFLDFSVSFWIRIPKYKNDGIQNYIHNEYTIINCMKNNSGWKISIRGNRIIWTLIDINGKTKSVFFEYNIREDISEYINRWFFVTITNNLNNAKIYINGKLESNTDIKDIREVIANGEIIFKLDGDIDRTQFIWMKYFSIFNTELSQSNIEERYKIQSYSEYLKDFWGNPLMYNKEYYMFNAGNKNSYIKLKKDSPVGEILTRSKYNQNSKYINYRDLYIGEKFIIRRKSNSQSINDDIVRKEDYIYLDFFNLNQEWRVYTYKYFKKEEEKLFLAPISDSDEFYNTIQIKEYDEQPTYSCQLLFKKDEESTDEIGLIGIHRFYESGIVFEEYKDYFCISKWYLKEVKRKPYNLKLGCNWQFIPKDEGWTE

SEQ ID NO: 120 - protein, 90 aa, Clostridium botulinum D phage
MDINDDLNINSPVDNKNVVIVRARKTNTFFKAFKVAPNIWVAPERYYGEPLDIAEEYKLDGGIYDSNFLSQDSERENFLQAIIILLKRIN

SEQ ID NO: 121 - protein, 1291 aa, Clostridium botulinum
MPVTINNFNYNDPIDNNNIIMMEPPFARGMGRYYKAFKITDRIWIIPERYTFGYKPEDFNKSSGIFNRDVCEYYDPDYLNTNDKKNIFLQTMIKLFNRIKSKPLGEKLLEMIINGIPYLGDRRVPLEEFNTNIASVTVNKLISNPGEVERKKGIFANLIIFGPGPVLNENETIDIGIQNHFASREGFGGIMQMKFCPEYVSVFNNVQENKGASIFNRRGYFSDPALILMHELIHVLHGLYGIKVNDLPIVPNEKKFFMQSTDAIQAEELYTFGGQDPSIISPSTDKSIYDKVLQNFRGIVDRLNKVLVCISDPNININIYKNKFKDKYKFVEDSEGKYSIDVESFDKLYKSLMFGFTETNIAENYKIKTRASYFSDSLPPVKIKNLLDNEIYTIEEGFNISDKNMEKEYRGQNKAINKQAYEEISKEHLAVYKIQMCKSVKAPGICIDVDNEDLFFIADKNSFSDDLSKNERIAYNTQNNYIENDFSINELILDTDLISKIELPSENTESLTDFNVYVPVYKKQPAIKKIFTDENTIFQYLYSQTFPLDIRDISLTSSFDDALLFSNKVYSFFSMDYIKTANKVVEAGLFAGWVKQIVNDFVIEANKSSTMDKIADISLIVPYIGLALNVGNETAKGNFENAFEIAGASILLEFIPELLIPVVGAFLLESYIDNKNKIIETINSALTKRDEKWIDMYGLIVAQWLSTVNTQFYTIKEGMYKALNYQAQALEEIIKYKYNIYSEKERSNINIDFNDVNSKLNEGINQAIDNINNFINECSVSYLMKKMIPLAVEKLLDFDNTLRKNLLNYIDENKLYLIGSAEYEKSKVDKYLKTSIPFDLSTYTNNTILIEIFNKYNSDILNNIILNLRYRDNKLIDLSGYGAKVEVYDGVKLNDKNQFKLTSSANSKIRVTQNQNIIFNSMFLDFSVSFWIRIPKYKNDGIQNYIHNEYTIINCMKNNSGWKISIRGNMIIWTLIDINGKIKSVFFEYSIKEDISEYINRWFFVTITNNSDNAKIYINGKLESHIDIRDIREVIANDEIIFKLDGNIDRTQFIWMKYFSIFNTELSQSNIEEIYKIQSYSEYLKDFWGNPLMYNKEYYMFNAGNKNSYIKLKKDSSVGEILTRSKYNQNSKYINYRDLYIGEKFIIRRKSNSQSINDDIVRKEDYIYLDFFNLNQEWRVYMYKYFKKEEEKLFLAPISDSDEFYNTIQIKEYDEQPTYSCQLLFKKDEESTDEIGLIGIHRFYESGIVFKEYKDYFCISKWYLKEVKRKPYNSKLGCNWQFIPKDEGWTE

SEQ ID NO: 122 - protein, 1291 aa, Clostridium botulinum
MSVTINNFNYNDPIDNDNIIMMEPPFARGTGRYYKAFKITDRIWIIPERYTFGYKPEDFNKSSGIFNRDVCEYYDPDYLNTNDKKNIFLQTMIKLFNRIKSKPLGEKLLEMIINGIPYLGDRRVPLEEFNTNIASVTVNKLISNPGEVERKKGIFANLIIFGPGPVLNENETIDIGIQNHFASREGFGGIMQMKFCPEYVSVFNNVQENKGASIFNRRGYFSDPALILMHELIHVLHGLYGIKVNDLPIVPNEKKFFMQSTDAIQAEELYTFGGQDPSIISPSTDKSIYDKVLQNFRGIVDRLNKVLVCISDPNININIYKNKFKDKYKFVEDSEGKYSIDVESFDKLYKSLMFGFTETNIAENYKIKTRASYFSDSLPPVKIKNLLDNEIYTIEEGFNISDKNMEKEYRGQNKAINKQAYEEISKEHLAVYKIQMCKSVKAPGICIDVDNEDLFFIADKNSFSDDLSKNERIAYNTQNNYIDNDFSINELILDTDLISKIELPSENTESLTDFNVYVPEYKKQPAIKKIFTDENTIFQYLYSQTFPLDIRDISLTSSFDDALLFSNKVYSFFSMDYIKTANKVVEAGLFAGWVKQIVDDFVIEANKSSTMDKIADISLIVPYIGLALNVGNETAKGNFENAFEIAGASILLEFIPELLIPVVGAFLLESYIDNKNKIIETINSALTKRDEKWIDMYGLIVAQWLSTVNTQFYTIKEGMYKALNYQAQALEEIIKYKYNIYSEKERSNINIDFNDVNSKLNEGINQAIDNINNFINECSVSYLMKKMIPLAVEKLLDFDNTLRKNLLNYIDENKLYLIGSAEYEKSKVDKYLKTSIPFDLSTYTNNTILIEIFNKYNSDILNNIILNLRYRDNKLIDLSGYGAKVEVYDGVKLNDKNQFKLTSSANSKIRVIQNQNIIFNSMFLDFSVSFWIRIPKYKNDGIQNYIHNEYTIINCMKNNSGWKISIRGNMIIWTLIDINGKIKSVFFEYSIKEDISEYINRWFFVTITNNSDNAKIYINGKLESHIDIRDIREVIANDEIIFKLDGNIDRTQFIWMKYFSIFNTELSQSNIEEIYKIQSYSEYLKDFWGNPLMYNKEYYMFNAGNKNSYIKLKKDSPVGEILTRSKYNQNSKYINYRDLYIGEKFIIRRKSNSQSINDDIVRKEDYIYLDFFNLNQEWRVYIYKYFKKEEEKLFLAPISDSDEFYNTIQIKEYDEQPTYSCQLLFKKDEESTDEIGLIGIHRFYESGIVFKEYKDYFCISKWYLKEVKRKPYNSKLGCNWQFIPKDEGWTE

SEQ ID NO: 123 - protein, 1291 aa, Clostridium botulinum
MPVTINNFNYNDPIDNNNIIMMEPPFARGMGRYYKAFKITDRIWIIPERYTFGYKPEDFNKSSGIFNRDVCEYYDPDYLNTNDKKNIFLQTMIKLFNRIKSKPLGEKLLEMIINGIPYLGDRRVPLEEFNTNIASVTVNKLISNPGEVERKKGIFANLIIFGPGPVLNENETIDIGIQNHFASREGFGGIMQMKFCPEYVSVFNNVQENKGASIFNRRGYFSDPALILMHELIHVLHGLYGIKVNDLPIVPNEKKFFMQSTDAIQAEELYTFGGQDPSIISPSTDKSIYDKVLQNFRGIVDRLNKVLVCISDPNININIYKNKFKDKYKFVEDSEGKYSIDVESFDKLYKSLMFGFTETNIAENYKIKTRAAYFSDSLPPVKIKNLLDNEIYTIEEGFNISDKNMEKEYRGQNKAINKQAYEEISKEHLAVYKIQMCKSVKAPGICIDVDNEDLFFIADKNSFSDDLSKNERIAYNTQNNYIENDFSINELILDTDLISKIELPSENTESLTDFNVYVPVYKKQPAIKKIFTDENTIFQYLYSQTFPLDIRDISLTSSFDDALLFSNKVYSFFSMDYIKTANKVVEAGLFAGWVKQIVDDFVIEANKSSTMDKIADISLIVPYIGLALNVGNETAKGNFENAFEIAGASILLEFIPELLIPVVGAFLLESYIDNKNKIIETINSALTKRDEKWIDMYGLIVAQWLSTVNTQFYTIKEGMYKALNYQAQALEEIIKYKYNIYSEKERSNINIDFNDVNSKLNEGINQAIDNINNFINECSVSYLMKKMIPLAVEKLLDFDNTLRKNLLNYIDENKLYLIGSAEYEKSKVDKYLKTSIPFDLSTYTNNTILIEIFNKYNSDILNNIILNLRYRDNKLIDLSGYGAKVEVYDGVKLNDKNQFKLTSSANSKIRVIQNQNIIFNSMFLDFSVSFWIRIPKYKNDGIQNYIHNEYTIINCMKNNSGWKISIRGNMIIWTLIDINGKIKSVFFEYSIKEDISEYINRWFFVTITNNSDNAKIYINGKLESHIDIRDIREVIANDEIIFKLDGNIDRTQFIWMKYFSIFNTELSQSNIEEIYKIQSYSEYLKDFWGNPLMYNKEYYMFNAGNKNSYIKLKKDSSVGEILTRSKYNQNSKYINYRDLYIGEKFIIRRKSNSQSINDDIVRKEDYIYLDFFNLNQEWRVYMYKYFKKEEEKLFLAPISDSDEFYNTIQIKEYDEQPTYSCQLLFKKDEESTDEIGLIGIHRFYESGIVFKEYKDYFCISKWYLKEVKRKPYNSKLGCNWQFIPKDEGWTE

SEQ ID NO: 124 - protein, 1251 aa, Clostridium butyricum; identical to SEQ ID NO: 5

SEQ ID NO: 125 - protein, 1252 aa, Clostridium butyricum
MPTINSFNYNDPVNNRTILYIKPGGCQQFYKSFNIMKNIWIIPERNVIGTIPQDFLPPTSLKNGDSSYYDPNYLQSDQEKDKFLKIVTKIFNRINDNLSGRILLEELSKANPYLGNDNTPDGDFIINDASAVPIQFSNGSQSILLPNVIIMGAEPDLFETNSSNISLRNNYMPSNHGFGSIAIVTFSPEYSFRFKDNSMNEFIQDPALTLMHELIHSLHGLYGAKGITTKYTITQKQNPLITNIRGTNIEEFLTFGGTDLNIITSAQSNDIYTNLLADYKKIASKLSKVQVSNPLLNPYKDVFEAKYGLDKDASGIYSVNINKFNDIFKKLYSFTEFDLATKFQVKCRQTYIGQYKYFKLSNLLNDSIYNISEGYNINNLKVNFRGQNANLNPRIITPITGRGLVKKIIRFCKNIVSVKGIRKSICIEINNGELFFVASENSYNDDNINTPKEIDDTVTSNNNYENDLDQVILNFNSESAPGLSDEKLNLTIQNDAYIPKYDSNGTSDIEQHDVNELNVFFYLDAQKVPEGENNVNLTSSIDTALLEQPKIYTFFSSEFINNVNKPVQAALFVGWIQQVLVDFTTEANQKSTVDKIADISIVVPYIGLALNIGNEAQKGNFKDALELLGAGILLEFEPELLIPTILVFTIKSFLGSSDNKNKVIKAINNALKERDEKWKEVYSFIVSNWMTKINTQFNKRKEQMYQALQNQVNALKAIIESKYNSYTLEEKNELTNKYDIEQIENELNQKVSIAMNNIDRFLTESSISYLMKLINEVKINKLREYDENVKTYLLDYIIKHGSILGESQQELNSMVIDTLNNSIPFKLSSYTDDKILISYFNKFFKRIKSSSVLNMRYKNDKYVDTSGYDSNININGDVYKYPTNKNQFGIYNDKLSEVNISQNDYIIYDNKYKNFSISFWVRIPNYDNKIVNVNNEYTIINCMRDNNSGWKVSLNHNEIIWTLQDNSGINQKLAFNYGNANGISDYINKWIFVTITNDRLGDSKLYINGNLIDKKSILNLGNIHVSDNILFKIVNCSYTRYIGIRYFNIFDKELDETEIQTLYNNEPNANILKDFWGNYLLYDKEYYLLNVLKPNNFINRRTDSTLSINNIRSTILLANRLYSGIKVKIQRVNNSSTNDNLVRKNDQVYINFVASKTHLLPLYADTATTNKEKTIKISSSGNRFNQVVVMNSVGNNCTMNFKNNNGNNIGLLGFKADTVVASTWYYTHMRDNTNSNGFFWNFISEEHGWQEK

SEQ ID NO: 126 - protein, 1255 aa, Clostridium butyricum
MLYMPTINSFNYNDPVNNRTILYIKPGGCQQFYKSFNIMKNIWIIPERNVIGTIPQDFLPPTSLKNGDSSYYDPNYLQSDQEKDKFLKIVTKIFNRINDNLSGRILLEELSKANPYLGNDNTPDGDFIINDASAVPIQFSNGSQSILLPNVIIMGAEPDLFETNSSNISLRNNYMPSNHGFGSIAIVTFSPEYSFRFKDNSMNEFIQDPALTLMHELIHSLHGLYGAKGITTKYTITQKQNPLITNIRGTNIEEFLTFGGTDLNIITSAQSNDIYTNLLADYKKIASKLSKVQVSNPLLNPYKDVFEAKYGLDKDASGIYSVNINKFNDIFKKLYSFTEFDLATKFQVKCRQTYIGQYKYFKLSNLLNDSIYNISEGYNINNLKVNFRGQNANLNPRIITPITGRGLVKKIIRFCKNIVSVKGIRKSICIEINNGELFFVASENSYNDDNINTPKEIDDTVTSNNNYENDLDQVILNFNSESAPGLSDEKLNLTIQNDAYIPKYDSNGTSDIEQHDVNELNVFFYLDAQKVPEGENNVNLTSSIDTALLEQPKIYTFFSSEFINNVNKPVQAALFVGWIQQVLVDFTTEANQKSTVDKIADISIVVPYIGLALNIGNEAQKGNFKDALELLGAGILLEFEPELLIPTILVFTIKSFLGSSDNKNKVIKAINNALKERDEKWKEVYSFIVSNWMTKINTQFNKRKEQMYQALQNQVNALKAIIESKYNSYTLEEKNELTNKYDIEQIENELNQKVSIAMNNIDRFLTESSISYLMKLINEVKINKLREYDENVKTYLLDYIIKHGSILGESQQELNSMVIDTLNNSIPFKLSSYTDDKILISYFNKFFKRIKSSSVLNMRYKNDKYVDTSGYDSNININGDVYKYPTNKNQFGIYNDKLSEVNISQNDYIIYDNKYKNFSISFWVRIPNYDNKIVNVNNEYTIINCMRDNNSGWKVSLNHNEIIWTLQDNSGINQKLAFNYGNANGISDYINKWIFVTITNDRLGDSKLYINGNLIDKKSILNLGNIHVSDNILFKIVNCSYTRYIGIRYFNIFDKELDETEIQTLYNNEPNANILKDFWGNYLLYDKEYYLLNVLKPNNFINRRTDSTLSINNIRSTILLANRLYSGIKVKIQRVNNSSTNDNLVRKNDQVYINFVASKTHLLPLYADTATTNKEKTIKISSSGNRFNQVVVMNSVGNNCTMNFKNNNGNNIGLLGFKADTVVASTWYYTHMRDNTNSNGFFWNFISEEHGWQEK

SEQ ID NO: 127 - protein, 1251 aa, Clostridium butyricum
MPKINSFNYNDPVNDRTILYIKPGGCQEFYKSFNIMKNIWIIPERNVIGTTPQDFHPPTSLKNGDSSYYDPNYLQSDEEKDRFLKIVTKIFNRINNNLSGGILLEELSKANPYLGNDNTPDNQFHIGDASAVEIKFSNGSQDILLPNVIIMGAEPDLFETNSSNISLRNNYMPSNHGFGSIAIVTFSPEYSFRFNDNSMNEFIQDPALTLMHELIHSLHGLYGAKGITTKYTITQKQNPLITNIRGTNIEEFLTFGGTDLNIITSAQSNDIYTNLLADYKKIASKLSKVQVSNPLLNPYKDVFEAKYGLDKDASGIYSVNINKFNDIFKKLYSFTEFDLATKFQVKCRQTYIGQYKYFKLSNLLNDSIYNISEGYNINNLKVNFRGQNANLNPRIITPITGRGLVKKIIRFCKNIVSVKGIRKSICIEINNGELFFVASENSYNDDNINTPKEIDDTVTSNNNYENDLDQVILNFNSESAPGLSDEKLNLTIQNDAYIPKYDSNGTSDIEQHDVNELNVFFYLDAQKVPEGENNVNLTSSIDTALLEQPKIYTFFSSEFINNVNKPVQAALFVSWIQQVLVDFTTEANQKSTVDKIADISIVVPYIGLALNIGNEAQKGNFKDALELLGAGILLEFVPELLIPTILVFTIKSFLGSSDNKNKVIKAINNALKERDEKWKEVYSFIVSNWMTKINTQFNKRKEQMYQALQNQVNALKTIIEFKYNSYTLEEKKELKNNYDIEQIENELNQKVSIAMNNIDRFLTESSISYLMKLINEVKINKLREYDENVKTYLLDYIIQHGSILGESQQELNSMVIDTLNNSIPFKLSSYTDDKILISYFNKFFKRIKSSSVLNMRYKNDKYVDTSGYDSNININGEIFIYPTNKNQFTIFNSKPSEVNISQNDYIIYDNKYKNFSISFWVRIPNYDNKIVNINNEYTIINCMRDNNSGWKVSLNHNEIIWTLQDNARINQKLVFKYGNANGISDYINKWIFVTITNDRLGDSKLYINGHLIDQKSILNLGNIHVSDNILFKIVNCSYTRYIGIRYFNIFDKELDETEIQTLYSNEPNTNILKDFWGNYLLYDKGYYLLNVLKPNNFIDRRKDSTLSINNIRSTILLANRLYSGIKVKIQRVNDSSTNDRFVRKNDQVYINYISNSSSYSLYADTNTTDKEKTIKSSSSGNRFNQVVVMNSVGNNCTMNFKNNNGNNIGLLGFKADTVVASTWYYTHMRDHTNSNGCFWNFISEEHGWQEK

SEQ ID NO: 128 - protein, 1252 aa, Clostridium botulinum
MPKINSFNYNDPVNDRTILYIKPGGCQEFYKSFNIMKNIWIIPERNVIGTTPQDFHPPTSLKNGDSSYYDPNYLQSDEEKDRFLKIVTKIFNRINNNLSGGILLEELSKANPYLGNDNTPDNQFHIGDASAVEIKFSNGSQDILLPNVIIMGAEPDLFETNSSNISLRNNYMPSNHGFGSIAIVTFSPEYSFRFNDNSMNEFIQDPALTLMHELIHSLHGLYGAKGITTKYTITQKQNPLITNIRGTNIEEFLTFGGTDLNIITSAQSNDIYTNLLADYKKIASKLSKVQVSNPLLNPYKDVFEAKYGLDKDASGIYSVNINKFNDIFKKLYSFTEFDLATKFQVKCRQTYIGQYKYFKLSNLLNDSIYNISEGYNINNLKVNFRGQNANLNPRIITPITGRGLVKKIIRFCKNIVSVKGIRKSICIEINNGELFFVASENSYNDDNINTPKEIDDTVTSNNNYENDLDQVILNFNSESAPGLSDEKLNLTIQNDAYIPKYDSNGTSDIEQHDVNELNVFFYLDAQKVPEGENNVNLTSSIDTALLEQPKIYTFFSSEFINNVNKPVQAALFVSWIQQVLVDFTTEANQKSTVDKIADISIVVPYIGLALNIGNEAQKGNFKDALELLGAGILLEFEPELLIPTILVFTIKSFLGSSDNKNKVIKAINNALKERDEKWKEVYSFIVSNWMTKINTQFNKRKEQMYQALQNQVNAIKTIIESKYNSYTLEEKNELTNKYDIKQIENELNQKVSIAMNNIDRFLTESSISYLMKLINEVKINKLREYDENVKTYLLNYIIQHGSILGESQQELNSMVTDTLNNSIPFKLSSYTDDKILISYFNKFFKRIKSSSVLNMRYKNDKYVDTSGYDSNININGDVYKYPTNKNQFGIYNDKLSEVNISQNDYIIYDNKYKNFSISFWVRIPNYDNKIVNVNNEYTIINCMRDNNSGWKVSLNHNEIIWTLQDNAGINQKLAFNYGNANGISDYINKWIFVTITNDRLGDSKLYINGNLIDQKSILNLGNIHVSDNILFKIVNCSYTRYIGIRYFNIFDKELDETEIQTLYSNEPNTNILKDFWGNYLLYDKEYYLLNVLKPNNFIDRRKDSTLSINNIRSTILLANRLYSGIKVKIQRVNNSSTNDNLVRKNDQVYINFVASKTHLFPLYADTATTNKEKTIKISSSGNRFNQVVVMNSVGNNCTMNFKNNNGNNIGLLGFKADTVVASTWYYTHMRDHTNSNGCFWNFISEEHGWQEK

SEQ ID NO: 129 - protein, 1251 aa, Clostridium botulinum
MPKINSFNYNDPVNDRTILYIKPGGCQEFYKSFNIMKNIWIIPERNVIGTTPQDFHPPTSLKNGDSSYYDPNYLQSDEEKDRFLKIVTKIFNRINNNLSGGILLEELSKANPYLGNDNTPDNQFHIGDASAVEIKFSNGSQDILLPNVIIMGAEPDLFETNSSNISLRNNYMPSNHRFGSIAIVTFSPEYSFRFNDNCMNEFIQDPALTLMHELIHSLHGLYGAKGITTKYTITQKQNPLITNIRGTNIEEFLTFGGTDLNIITSAQSNDIYTNLLADYKKIASKLSKVQVSNPLLNPYKDVFEAKYGLDKDASGIYSVNINKFNDIFKKLYSFTEFDLRTKFQVKCRQTYIGQYKYFKLSNLLNDSIYNISEGYNINNLKVNFRGQNANLNPRIITPITGRGLVKKIIRFCKNIVSVKGIRKSICIEINNGELFFVASENSYNDDNINTPKEIDDTVTSNNNYENDLDQVILNFNSESAPGLSDEKLNLTIQNDAYIPKYDSNGTSDIEQHDVNELNVFFYLDAQKVPEGENNVNLTSSIDTALLEQPKIYTFFSSEFINNVNKPVQAALFVSWIQQVLVDFTTEANQKSTVDKIADISIVVPYIGLALNIGNEAQKGNFKDALELLGAGILLEFEPELLIPTILVFTIKSFLGSSDNKNKVIKAINNALKERDEKWKEVYSFIVSNWMTKINTQFNKRKEQMYQALQNQVNAIKTIIESKYNSYTLEEKNELTNKYDIKQIENELNQKVSIAMNNIDRFLTESSISYLMKIINEVKINKLREYDENVKTYLLNYIIQHGSILGESQQELNSMVTDTLNNSIPFKLSSYTDDKILISYFNKFFKRIKSSSVLNMRYKNDKYVDTSGYDSNININGDVYKYPTNKNQFGIYNDKLSEVNISQNDYIIYDNKYKNFSISFWVRIPNYDNKIVNVNNEYTIINCMRDNNSGWKVSLNHNEIIWTFEDNRGINQKLAFNYGNANGISDYINKWIFVTITNDRLGDSKLYINGNLIDQKSILNLGNIHVSDNILFKIVNCSYTRYIGIRYFNIFDKELDETEIQTLYSNEPNTNILKDFWGNYLLYDKEYYLLNVLKPNNFIDRRKDSTLSINNIRSTILLANRLYSGIKVKIQRVNNSSTNDNLVRKNDQVYINFVASKTHLFPLYADTATTNKEKTIKISSSGNRFNQVVVMNSVGNCTMNFKNNNGNNIGLLGFKADTVVASTWYYTHMRDHTNSNGCFWNFISEEHGWQEK

SEQ ID NO: 130 - protein, 1296 aa, Clostridium botulinum; identical to SEQ ID NO: 1

SEQ ID NO: 131 - protein, 66 aa, Clostridium botulinum
MKINNNFNIDSPVDNKDVAIVRGRKTDIFLKVFQVAPNIWVAPERYYGESLNINEDQKSDGGIYDS

SEQ ID NO: 132 - protein, 66 aa, Clostridium botulinum
MKINNNFNIDSLIDNRDVAIVRGRKTDTFFKVFQVAPNIWIAPERYYGESLNINEDQKSDGGIYDS

SEQ ID NO: 133 - protein, 451 aa, Clostridium botulinum
MPVTINNFNYNDPIDNNNIIMMEPPFARGTGRYYKAFKITDRIWIIPERYTFGYKPEDFNKSSGIFNRDVCEYYDPDYLNTNDKKNIFLQTMIKLFNRIKSKPLGEKLLEMIINGIPYLGDRRVPLEEFNTNIASVTVNKLISNPGEVERKKGIFANLIIFGPGPVLNENETIDIGIQNHFASREGFGGIMQMKFCPEYVSVFNNVQENKGASIFNRRGYFSDPALILMHELIHVLHGLYGIKVDDLPIVPNEKKFFMQSTDAIQAEELYTFGGQDPSIITPSTDKSIYDKVLQNFRGIVDRLNKVLVCISDPSININIYKNKFKDKYKFVEDSEGKYSIDVESFDKLYKSLMFGFTETNIAENYKIKTRASYFSDSLPPVKIKNLLDNEIYTIEEGFNISDKDMEKEYRGQNKAINKQAYEEISKEHLAVYKIQMCKSVKAPGICIDVDN

SEQ ID NO: 134 - protein, 55 aa, Clostridium botulinum
MKINDDLNINSPVDNKNVVIVRARKTNIFFKAFQVAPNIWVAPERYYGEPLNISD

SEQ ID NO: 135 - protein, 1291 aa, Clostridium botulinum phage
MPITINNFNYSDPVDNKNILYLDTHLNTLANEPEKAFRITGNIWVIPDRFSRNSNPNLNKPPRVTSPKSGYYDPNYLSTDSDKDTFLKEIIKLFKRINSREIGEELIYRLSTDIPFPGNNNTPINTFDFDVDFNSVDVKTRQGNNWVKTGSINPSVIITGPRENIIDPETSTFKLTNNTFAAQEGFGALSIISISPRFMLTYSNATNDVGEGRFSKSEFCMDPILILMHELNHAMHNLYGIAIPNDQTISSVTSNIFYSQYNVKLEYAEIYAFGGPTIDLIPKSARKYFEEKALDYYRSIAKRLNSITTANPSSFNKYIGEYKQKLIRKYRFVVESSGEVTVNRNKFVELYNELTQIFTEFNYAKIYNVQNRKIYLSNVYTPVTANILDDNVYDIQNGFNIPKSNLNVLFMGQNLSRNPALRKVNPENMLYLFTKFCHKAIDGRSLYNKTLDCRELLVKNTDLPFIGDISDVKTDIFLRKDINEETEVIYYPDNVSVDQVILSKNTSEHGQLDLLYPSIDSESEILPGENQVFYDNRTQNVDYLNSYYYLESQKLSDNVEDFTFTRSIEEALDNSAKVYTYFPTLANKVNAGVQGGLFLMWANDVVEDFTTNILRKDTLDKISDVSAIIPYIGPALNISNSVRRGNFTEAFAVTGVTILLEAFPEFTIPALGAFVIYSKVQERNEIIKTIDNCLEQRIKRWKDSYEWMMGTWLSRIITQFNNISYQMYDSLNYQAGAIKAKIDLEYKKYSGSDKENIKSQVENLKNSLDVKISEAMNNINKFIRECSVTYLFKNMLPKVIDELNEFDRNTKAKLINLIDSHNIILVGEVDKLKAKVNNSFQNTIPFNIFSYTNNSLLKDIINEYFNNINDSKILSLQNRKNTLVDTSGYNAEVSEEGDVQLNPIFPFDFKLGSSGEDRGKVIVTQNENIVYNSMYESFSISFWIRINKWVSNLPGYTIIDSVKNNSGWSIGIISNFLVFTLKQNEDSEQSINFSYDISNNAPGYNKWFFVTVTNNMMGNMKIYINGKLIDTIKVKELTGINFSKTITFEINKIPDTGLITSDSDNINMWIRDFYIFAKELDGKDINILFNSLQYTNVVKDYWGNDLRYNKEYYMVNIDYLNRYMYANSRQIVFNTRRNNNDFNEGYKIIIKRIRGNTNDTRVRGGDILYFDMTINNKAYNLFMKNETMYADNHSTEDIYAIGLREQTKDINDNIIFQIQPMNNTYYYASQIFKSNFNGENISGICSIGTYRFRLGGDWYRHNYLVPTVKQGNYASLLESTSTHWGFVPVSE

SEQ ID NO: 136 - protein, 1291 aa, Clostridium botulinum; identical to SEQ ID NO: 3

SEQ ID NO: 137 - protein, 425 aa, Clostridium botulinum
PVTINNFNYNDPIDNNNIIMMEPPFARGTGRYYKAFKITDRIWIIPERYTFGYKPEDFNKSSGIFNRDVCEYYDPDYLNTNDKKNIFLQTMIKLFNRIKSKPLGEKLLEMIINGIPYLGDRRVPLEEFNTNIASVTVNKLISNPGEVERKKGIFANLIIFGPGPVLNENETIDIGIQNHFASREGFGGIMQMKFCPEYVSVFNNVQENKGASIFNRRGYFSDPALILMHELIHVLHGLYGIKVDDLPIVPNEKKFFMQSTDAIQAEELYTFGGQDPSIITPSTDKSIYDKVLQNFRGIVDRLNKVLVCISDPNININIYKNKFKDKYKFVEDSEGKYSIDVESFDKLYKSLMFGFTETNIAENYKIKTRASYFSDSLPPVKIKNLLDNEIYTIEEGFNISDKDMEKEYRGQNKAINKQAYEEISK

SEQ ID NO: 138 - protein, 424 aa, Clostridium botulinum
PVTINNFNYNDPIDNNNIIMMEPPFARGTGRYYKAFKITDRIWIIPERYTFGYKPEDFNKSSGIFNRDVCEYYDPDYLNTNDKKNIFLQTMIKLFNRIKSKPLGEKLLEMIINGIPYLGDRRVPLEEFNTNIASVTVNKLISNPGEVERKKGIFANLIIFGPGPVLNENETIDIGIQNHFASREGFGGIMQMKFCPEYVSVFNNVQENKGASIFNRRGYFSDPALILMHELIHVLHGLYGIKVDDLPIVPNEKKFFMQSTDAIQAEELYTFGGQDPSIITPSTDKSIYDKVLQNFRGIVDRLNKVLVCISDPNININIYKNKFKDKYKFVEDSEGKYSIDVESFDKLYKSLMFGFTETNIAENYKIKTRASYFSDSLPPVKIKNLLDNEIYTIEEGFNISDKDMEKEYRGQNKAINKQAYEEIS

SEQ ID NO: 139 - protein, 1280 aa, Clostridium botulinum
MPITINNFNYSDPVDNKNILYLDTHLNTLANEPEKAFRIIGNIWVIPDRFSRDSNPNLNKPPRVTSPKSGYYDPNYLSTDSEKDTFLKEIIKLFKRINSREIGEELIYRLATDIPFPGNNNTPINTFDFDVDFNSVDVKTRQGNNWVKTGSINPSVIITGPRENIIDPETSTFKLTNNTFAAQEGFGALSIISISPRFMLTYSNATNNVGEGRFSKSEFCMDPILILMHELNHAMHNLYGIAIPNDQRISSVTSNIFYSQYKVKLEYAEIYAFGGPTIDLIPKSARKYFEEKALDYYRSIAKRLNSITTANPSSFNKYIGEYKQKLIRKYRFVVESSGEVAVDRNKFAELYKELTQIFTEFNYAKIYNVQNRKIYLSNVYTPVTANILDDNVYDIQNGFNIPKSNLNVLFMGQNLSRNPALRKVNPENMLYLFTKFCHKAIDGRSLYNKTLDCRELLVKNTDLPFIGDISDIKTDIFLSKDINEETEVIDYPDNVSVDQVILSKNTSEHGQLDLLYPIIEGESQVLPGENQVFYDNRTQNVDYLNSYYYLESQKLSDNVEDFTFTTSIEEALDNSGKVYTYFPKLADKVNTGVQGGLFLMWANDVVEDFTTNILRKDTLDKISDVSAIIPYIGPALNISNSVRRGNFTEAFAVTGVTILLEAFQEFTIPALGAFVIYSKVQERNEIIKTIDNCLEQRIKRWKDSYEWMIGTWLSRITTQFNNISYQMYDSLNYQADAIKDKIDLEYKKYSGSDKENIKSQVENLKNSLDIKISEAMNNINKFIRECSVTYLFKNMLPKVIDELNKFDLKTKTELINLIDSHNIILVGEVDRLKAKVNESFENTIPFNIFSYTNNSLLKDIINEYFNSINDSKILSLQNKKNALVDTSGYNAEVRLEGDVQVNTIYTNDFKLSSSGDKIIVNLNNNILYSAIYENSSVSFWIKISKDLTNSHNEYTIINSIKQNSGWKLCIRNGNIEWILQDINRKYKSLIFDYSESLSHTGYTNKWFFVTITNNIMGYMKLYINGELKQSERIEDLNEVKLDKTIVFGIDENIDENQMLWIRDFNIFSKELSNEDINIVYEGQILRNVIKDYWGNPLKFDTEYYIINDNYIDRYIAPKSNILVLVQYPDRSKLYTGNPITIKSVSDKNPYSRILNGDNIMFHMLYNSGKYMIIRDTDTIYAIEGRECSKNCVYALKLQSNLGNYGIGIFSIKNIVSQNKYCSQIFSSFMKNTMLLADIYKPWRFSFENAYTPVAVTNYETKLLSTSSFWKFISRDPGWVE

SEQ ID NO: 140 - protein, 1280 aa, Clostridium botulinum
MPITINNFNYSDPVDNKNILYLDTHLNTLANEPEKAFRIIGNIWVIPDRFSRDSNPNLNKPPRVTSPKSGYYDPNYLSTDSEKDTFLKEIIKLFKRINSREIGEELIYRLATDIPFPGNNNTPINTFDFDVDFNSVDVKTRQGNNWVKTGSINPSVIITGPRENIIDPETSTFKLTNNTFAAQEGFGALSIISISPRFMLTYSNATNNVGEGRFSKSEFCMDPILILMHELNHTMHNLYGIAIPNDQRISSVTSNIFYSQYKVKLEYAEIYAFGGPTIDLIPKSGRKYFEEKALDYYRSIAKRLNSITTANPSSFNKYIGEYKQKLIRKYRFVVESSGEVAVDRNKFAELYKELTQIFTEFNYAKIYNVQNRKIYLSNVYTPVTANILDDNVYDIQNGFNIPKSNLNVLFMGQNLSRNPALRKVNPENMLYLFTKFCHKAIDGRSLYNKTLDCRELLVKNTDLPFIGDISDIKTDIFLSKDINVETEVIDYPDNVSVDQVILSKNTSEHGQLDLLYPIIEGESQVLPGENQVFYDNRTQNVDYLNSYYYLESQKLSDNVEDFTFTTSIEEALDNSGKVYTYFPKLADKVNTGVQGGLFLMWANDVVEDFTTNILRKDTLDKISDVSAIIPYIGPALNISNSVRRENFTEAFAVTGVTILLEAFQEFTIPALGAFVIYSKVQERNEIIKTIDNCLEQRIKRWKDSYEWMIGTWLSRITTQFNNISYQMYDSLNYQADAIKDKIDLEYKKYSGSDKENIKSQVENLKNSLDIKISEAMNNINKFIRECSVTYLFKNMLPKVIDELNKFDLKTKTELINLIDSHNIILVGEVDRLKAKVNESFENTIPFNIFSYTNNSLLKDIINEYFNSINDSKILSLQNKKNALVDTSGYNAEVRLEGDVQVNTIYTNDFKLSSSGDKIIVNLNNNILYSAIYENSSVSFWIKISKDLTNSHNEYTIINSIKQNSGWKLCIRNGNIEWILQDINRKYKSLIFDYSESLSHTGYTNKWFFVTITNNIMGYMKLYINGELKQSERIEDLNEVKLDKTIVFGIDENIDENQMLWIRDFNIFSKELSNEDINIVYEGQILRNVIKDYWGNPLKFDTEYYIINDNYIDRYIAPKSNILVLVQYPDRSKLYTGNPITIKSVSDKNPYSRILNGDNIMFHMLYNSGKYMIIRDTDTIYAIEGRECSKNCVYALKLQSNLGNYGIGIFSIKNIVSQNKYCSQIFSSFMKNTMLLADIYKPWRFSFENAYTPVAVTNYETKLLSTSSFWKFISRDPGWVE

SEQ ID NO: 141 - protein, 552 aa, Clostridium botulinum phage CN
MPITINNFNYSDPVDNKNILYLDTHLNTLANEPEKAFRITGNIWVIPDRFSRNSNPNLNKPPRVTSPKSGYYDPNYLSTDSDKDTFLKEIIKLFKRINSREIGEELIYRLSTDIPFPGNNNTPINTFDFDVDFNSVDVKTRQGNNWVKTGSINPSVIITGPRENIIDPETSTFKLTNNTFAAQEGFGALSIISISPRFMLTYSNATNDVGEGRFSKSEFCMDPILILMHELNHAMHNLYGIAIPNDQTISSVTSNIFYSQYNVKLEYAEIYAFGGPTIDLIPKSARKYFEEKALDYYRSIAKRLNSITTANPSSFNKYIGEYKQKLIRKYRFVVESSGEVTVNRNKFVELYNELTQIFTEFNYAKIYNVQNRKIYLSNVYTPVTANILDDNVYDIQNGFNIPKSNLNVLFMGQNLSRNPALRKVNPENMLYLFTKFCHKAIDGRSLYNKTLDCRELLVKNTDLPFIGDISDVKTDIFLRKDINEETEVIYYPDNVSVDQVILSKNTSEHGQLDLLYPSIDSESEILPGENQVFYDNRTQNVDYLNSYYYLES

SEQ ID NO: 142 - protein, 1291 aa, Clostridium botulinum
MPVTINNFNYNDPIDNNNIIMMEPPFARGTGRYYKAFKITDRIWIIPERYTFGYKPEDFNKSSGIFNRDVCEYYDPDYLNTNDKKNIFLQTMIKLFNRIKSKPLGEKLLEMIINGIPYLGDRRVPLEEFNTNIASVTVNKLISNPGEVERKKGIFANLIIFGPGPVLNENETIDIGIQNHFASREGFGGIMQMKFCPEYVSVFNNVQENKGASIFNRRGYFSDPALILMHELIHVLHGLYGIKVDDLPIVPNEKKFFMQSTDAIQAEELYTFGGQDPSIITPSTDKSIYDKVLQNFRGIVDRLNKVLVCISDPNININIYKNKFKDKYKFVEDSEGKYSIDVESFDKLYKSLMFGFTETNIAENYKIKTRASYFSDSLPPVKIKNLLDNEIYTIEEGFNISDKNMEKEYRGQNKAINKQAYEEISKEHLAVYKIQMCKSVRAPGICIDVDNEDLFFIADKNSFSDDLSKNERIEYDTQSNYIENRSSIDELILDTNLISKIELPSENTESLTDFNVDVPVYEKQPAIKKIFTDENTIFQYLYSQTFPLDIRDISLTSSFDDALLFSNKVYSFFSMDYIKTANKVVEAGLFAGWVKQIVDDFVIEANKSSTMDKIADISLIVPYIGLALNVGNETAKGNFENAFEIAGASILLEFIPELLIPVVGAFLLESYIDNKNKIIKTIDNALTKRDEKWIDMYGLIVAQWLSTVNTQFYTIKEGMYKALNYQAQALEEIIKYKYNIYSEKEKSNINIDFNDINSKLNEGINQAVDNINNFINECSVSYLMKKMIPLAVEKLLDFDNTLKKNLLNYIDENKLYLIGSAEYEKSKVDKHLKTIIPFDLSMYTNNTILIEIFNKYNSEILNNIILNLRYRDNNLIDLSGYGANVEVYDGVELNDKNQFKLTSSTNSEIRVTQNQNIIFNSMFLDFSVSFWIRIPKYKNDGIQNYIHNEYTIINCIKNNSGWKISIRGNRIIWTLTDINGKTKSVFFEYSIREDISDYINRWFFVTITNNSDNAKIYINGKLESNIDIKDIGEVIANGEIIFKLDGDIDRTQFIWMKYFSIFNTELSQSNIKEIYKIQSYSEYLKDFWGNPLMYNKEYYMFNAGNKNSYIKLKKDSSVGEILTRSKYNQNSNYINYRNLYIGEKFIIRRKSNSQSINDDIVRKEDYIYLDFFNSNREWRVYAYKDFKEEEKKLFLANIYDSNEFYKTIQIKEYDEQPTYSCQLLFKKDEESTDEIGLIGIHRFYESGIVLKDYKNYFCISKWYLKEVKRKPYNPNLGCNWQFIPKDEGWIE

SEQ ID NO: 143 - protein, 438 aa, Clostridium butyricum
MPTINSFNYNDPVNNRTILYIKPGGCQQFYKSFNIMKNIWIIPERNVIGTIPQDFLPPTSLKNGDSSYYDPNYLQSDQEKDKFLKIVTKIFNRINDNLSGRILLEELSKANPYLGNDNTPDGDFIINDASAVPIQFSNGSQSILLPNVIIMGAEPDLFETNSSNISLRNNYMPSNHGFGSIAIVTFSPEYSFRFKDNSMNEFIQDPALTLMHELIHSLHGLYGAKGITTMYTITQKQNPLITNIRGTNIEEFLTFGGTDLNIITSAQSNDIYTNLLADYKKIASKLSKVQVSNPLLNPYKDVFEAKYGLDKDASGIYSVNINKFNDIFKKLYSFTEFVLATKFQVKCRQTYIGQYKYFKLSNLLNDSIYNISEGYNINNLKVNFRGQNANLNPRIITPITGRGLVKKIIRFCKNIVSVKGIRKSICIEINNGELFFVA

SEQ ID NO: 144 - protein, 457 aa, Clostridium botulinum
MPITINNFRYSDPVNNDTIIMMEPPYCKGLDIYYKAFKITDRIWIVPERYEFGTKPEDFNPPSSLIEGASEYYDPNYLRTDSDKDRFLQTMVKLFNRIKNNVAGEALLDKIINAIPYLGNSYSLLDKFDTNSNSVSFNLLEQDPSGATTKSAMLTNLIIFGPGPVLNKNEVRGIVLRVDNKNYFPCRDGFGSIMQMAFCPEYVPTFDNVIENITSLTIGKSKYFQDPALLLMHELIHVLHGLYGMQVSSHEIIPSKQEIYMQHTYPISAEELFTFGGQDANLISIDIKNDLYEKTLNDYKAIANKLSQVTSCNDPNIDIDSYKQIYQQKYQFDKDSNGQYIVNEDKFQILYNSIMYGFTEIELGKKFNIKTRLSYFSMNHDPVKIPNLLDDTIYNDTEGFNIESKDLKSEYKGQNMRVNTNAFRNVDGSGLVSKLIGLCKKIIPPTNIRENLYNRTA

SEQ ID NO: 145 - protein, 1315 aa, Clostridium tetani
MPITINNFRYSDPVNNDTIIMMEPPYCKGLDIYYKAFKITDRIWIVPERYEFGTKPEDFNPPSSLIEGASEYYDPNYLRTDSDKDRFLQTMVKLFNRIKNNVAGEALLDKIINAIPYLGNSYSLLDKFDTNSNSVSFNLLEQDPSGATTKSAMLTNLIIFGPGPVLNKNEVRGIVLRVDNKNYFPCRDGFGSIMQMAFCPEYVPTFDNVIENITSLTIGKSKYFQDPALLLMHELIHVLHGLYGMQVSSHEIIPSKQEIYMQHTYPISAEELFTFGGQDANLISIDIKNDLYEKTLNDYKAIANKLSQVTSCNDPNIDIDSYKQIYQQKYQFDKDSNGQYIVNEDKFQILYNSIMYGFTEIELGKKFNIKTRLSYFSMNHDPVKIPNLLDDTIYNDTEGFNIESKDLKSEYKGQNMRVNTNAFRNVDGSGLVSKLIGLCKKIIPPTNIRENLYNRTASLTDLGGELCIKIKNEDLTFIAEKNSFSEEPFQDEIVSYNTKNKPLNFNYSLDKIIVDYNLQSKITLPNDRTTPVTKGIPYAPEYKSNAASTIEIHNIDDNTIYQYLYAQKSPTTLQRITMTNSVDDALINSTKIYSYFPSVISKVNQGAQGILFLQWVRDIIDDFTNESSQKTTIDKISDVSTIVPYIGPALNIVKQGYEGNFIGALETTGVVLLLEYIPEITLPVIAALSIAESSTQKEKIIKTIDNFLEKRYEKWIEVYKLVKAKWLGTVNTQFQKRSYQMYRSLEYQVDAIKKIIDYEYKIYSGPDKEQIADEINNLKNKLEEKANKAMININIFMRESSRSFLVNQMINEAKKQLLEFDTQSKNILMQYIKANSKFIGITELKKLESKINKVFSTPIPFSYSKNLDCWVDNEEDIDVILKKSTILNLDINNDIISDISGFNSSVITYPDAQLVPGINGKAIHLVNNESSEVIVHKAMDIEYNDMFNNFTVSFWLRVPKVSASHLEQYGTNEYSIISSMKKHSLSIGSGWSVSLKGNNLIWTLKDSAGEVRQITFRDLPDKFNAYLANKWVFITITNDRLSSANLYINGVLMGSAEITGLGAIREDNNITLKLDRCNNNNQYVSIDKFRIFCKALNPKEIEKLYTSYLSITFLRDFWGNPLRYDTEYYLIPVASSSKDVQLKNITDYMYLTNAPSYTNGKLNIYYRRLYNGLKFIIKRYTPNNEIDSFVKSGDFIKLYVSYNNNEHIVGYPKDGNAFNNLDRILRVGYNAPGIPLYKKMEAVKLRDLKTYSVQLKLYDDKNASLGLVGTHNGQIGNDPNRDILIASNWYFNHLKDKILGCDWYFVPTDEGWTND

SEQ ID NO: 146 - protein, 2017 aa, Clostridium botulinum
MPITINNFRYSDPVNNDTIIMMEPPYCKGLDIYYKAFKITDRIWIVPERYEFGTKPEDFNPPSSLIEGASEYYDPNYLRTDSDKDRFLQTMVKLFNRIKNNVAGEALLDKIINAIPYLGNSYSLLDKFDTNSNSVSFNLLEQDPSGATTKSAMLTNLIIFGPGPVLNKNEVRGIVLRVDNKNYFPCRDGFGSIMQMAFCPEYVPTFDNVIENITSLTIGKSKYFQDPALLLMHELIHVLHGLYGMQVSSHEIIPSKQEIYMQHTYPISAEELFTFGGQDANLISIDIKNDLYEKTLNDYKAIANKLSQVTSCNDPNIDIDSYKQIYQQKYQFDKDSNGQYIVNEDKFQILYNSIMYGFTEIELGKKFNIKTRLSYFSMNHDPVKIPNLLDDTIYNDTEGFNIESKDLKSEYKGQNMRVNTNAFRNVDGSGLVSKLIGLCKKIIPPTNIRENLYNRTASLTDLGGELCIKIKNEDLTFIAEKNSFSEEPFQDEIVSYNTKNKPLNFNYSLDKIIVDYNLQSKITLPNDRTTPVTKGIPYAPEYKSNAASTIEIHNIDDNTIYQYLYAQKSPTTLQRITMTNSVDDALINSTKIYSYFPSVISKVNQGAQGILFLQWVRDIIDDFTNESSQKTTIDKISDVSTIVPYIGPALNIVKQGYEGNFIGALETTGVVLLLEYIPEITLPVIAALSIAESSTQKEKIIKTIDNFLEKRYEKWIEVYKMPVNIKNFNYNDPINNDDIIMMEPFNDPGPGTYYKAFRIIDRIWIVPERFTYGFQPDQFNASTGVFSKDVYEYYDPTYLKTDAEKDKFLKTMIKLFNRINSKPSGQRLLDMIVDAIPYLGNASTPPDKFAANVANVSINKKIIQPGAEDQIKGLMTNLIIFGPGPVLSDNFTDSMIMNGHSPISEGFGARMMIRFCPSCLNVFNNVQENKDTSIFSRRAYFADPALTLMHELIHVLHGLYGIKISNLPITPNTKEFFMQHSDPVQAEELYTFGGHDPSVISPSTDMNIYNKALQNFQDIANRLNIVSSAQGSGIDISLYKQIYKNKYDFVEDPNGKYSVDKDKFDKLYKALMFGFTETNLAGEYGIKTRYSYFSEYLPPIKTEKLLDNTIYTQNEGFNIASKNLKTEFNGQNKAVNKEAYEEISLEHLVIYRIAMCKPVMYKNTGKSEQCIIVNNEDLFFIANKDSFSKDLAKAETIAYNTQNNTIENNFSIDQLILDNDLSSGIDLPNENTEPFTNFDDIDIPVYIKQSALKKIFVDGDSLFEYLHAQTFPSNIENLQLTNSLNDALRNNNKVYTFFSTNLVEKANTVVGASLFVNWVKGVIDDFTSESTQKSTIDKVSDVSIIIPYIGPALNVGNETAKENFKNAFEIGGAAILMEFIPELIVPIVGFFTLESYVGNKGHIIMTISNALKKRDQKWTDMYGLIVSQWLSTVNTQFYTIKERMYNALNNQSQAIEKIIEDQYNRYSEEDKMNINIDFNDIDFKLNQSINLAINNIDDFINQCSISYLMNRMIPLAVKKLKDFDDNLKRDLLEYIDTNELYLLDEVNILKSKVNRHLKDSIPFDLSLYTKDTILIQVFNNYISNISSNAILSLSYRGGRLIDSSGYGATMNVGSDVIFNDIGNGQFKLNNSENSNITAHQSKFVVYDSMFDNFSINFWVRTPKYNNNDIQTYLQNEYTIISCIKNDSGWKVSIKGNRIIWTLIDVNAKSKSIFFEYSIKDNISDYINKWFSITITNDRLGNANIYINGSLKKSEKILNLDRINSSNDIDFKLINCTDTTKFVWIKDFNIFGRELNATEVSSLYWIQSSTNTLKDFWGNPLRYDTQYYLFNQGMQNIYIKYFSKASMGETAPRTNFNNAAINYQNLYLGLRFIIKKASNSRNINNDNIVREGDYIYLNIDNISDESYRVYVLVNSKEIQTQLFLAPINDDPTFYDVLQIKKYYEKTTYNCQILCEKDTKTFGLFGIGKFVKDYGYVWDTYDNYFCISQWYLRRISENINKLRLGCNWQFIPVDEGWTE

SEQ ID NO: 147 - protein, 438 aa, Clostridium botulinum
MPKINSFNYNDPVNDRTILYIKPGGCQEFYKSFNIMKNIWIIPERNVIGTTPQDFHPPTSLKNGDSSYYDPNYLQSDEEKDRFLKIVTKIFNRINNNLSGGILLEELSKANPYLGNDNTPDNQFHIGDASAVEIKFSNGSQDILLPNVIIMGAEPDLFETNSSNISLRNNYMPSNHGFGSIAIVTFSPEYSFRFNDNSMNEFIQDPALTLMHELIHSLHGLYGAKGITTMYTITQKQNPLITNIRGTNIEEFLTFGGTDLNIITSAQSNDIYTNLLADYKKIASKLSKVQVSNPLLNPYKDVFEAKYGLDKDASGIYSVNINKFNDIFKKLYSFTEFVLATKFQVKCRQTYIGQYKYFKLSNLLNDSIYNISEGYNINNLKVNFRGQNANLNPRIITPITGRGLVKKIIRFCKNIVSVKGIRKSICIEINNGELFFVA

SEQ ID NO: 148 - protein, 252 aa, Clostridium botulinum
MPTINSFNYNDPVNNRTILYIKPGGCQQFYKSFNIMKNIWIIPERNVIGTIPQDFLPPTSLKNGDSSYYDPNYLQSDQEKDKFLKIVTKIFNRINDNLSGRILLEELSKANPYLGNDNTPDGDFIINDASAVPIQFSNGSQSILLPNVIIMGAEPDLFETNSSNISLRNNYMPSNHGFGSIAIVTFSPEYSFRFKDNSMNEFIQDPALTLMHELIHSLHGLYGAKGITTMYTITQKQNPLITNIRGTNIEEF

SEQ ID NO: 149 - protein, 1310 aa, clostridium tetani
RIPITINNFRYSVPVNNDTIIMMEPPYCKGLDIYYKAFKITDRIWIVPERYEFGTKPEDFNPPSSLIEGASEYYDPNYLRTDSDKDRFLQTMVKLFNRIKNNVAGEALLDKIINAIPYLGNSYSLLDKFDTNSNSVSFNLSEQDPSGATTKSAMLTSLIIFGPGPVLNKNEVRGIVLRVDNKNYFPCRDGFGSIMQMTFCPEYIPTFDNVIENITSLTIGKSKYFQDPALLLMHELIHVLHGLYGMQVSSHEIIPSKQEIYMQHTYPISAEELFTFGGQDANLISIDIKNDLYEKTLNDYKAIANKLSQVTSCNDPNIDIDSYKQIYQQKYQFDKDSNGQYIVNEDKFQILYNSIMYGFTEIELGKKFNIKTRLSYFSMNHDPVKIPNLLDDTIYNDTEGFNIESKDLKSEYKGQNMRVNTNAFRNVDGSGLVSKLIGLCKKIIPPTNIRENLYNRTAALTDLGGELCIKIKNEDLIFIAEKNSFSEEPFQDEIVSYNTKNKPLNFNYSLDKIILDYNLQSKITLPNDRTTPVTKGIPYAPEYKSNAASTIEIHNIDDNTIYQYLYAQKSPTTLQRITMTNSVDDALINSTKIYSYFPSVISKVNQGAQGILFLQWVRDIIDDFTNESSQKTTIDKISDVSTIVPYIGPALNIVKQGYEGNFIGALETTGVVLLLEYIPEITLPVIAALSIAESSTQKEKIIKTIDNFLEKRYEKWIEVYKLVKAKWLGTVNTQFQKRSYQMYRSLEYQVDAIKKIIDYEYKIYSGPDKEQIADEINNLKNKLEEKANKAMININIFMRESSRSFLVNQMINETKKQLLEFDTQSKNILMQYIKANSKFIGITELKKLESKINKVFSTPIPFSYSKNLDCWVDNEEDIDVILKKSTILNLDINNDIISDISGFNSSVITYPDAQLVPGINGKAIHLVNNESSEVIVHKAMDIEYNDMFNNFTVSFWLRVPKVSASHLEQYDTNEYSIISSMKKYSLSIGSGWSVSLKGNNLIWTLKDSAGEVRQITFRDLSDKFNAYLANKWVFITITNDRLSSANLYINGVLMGSAEITGLGAIREDNNITLKLDRCNNNNQYVSIDKFRIFCKALNPKEIEKLYTSYLSITFLRDFWGNPLRYDTEYYLIPVAYSSKDVQLKNITDYMYLTNAPSYTNGKLNIYYRRLYSGLKFIIKRYTPNNEIDSFVRSGDFIKLYVSYNNNEHIVGYPKDGNAFNNLDRILRVGYNAPGIPLYKKMEAVKLRDLKTYSVQLKLYDDKDASLGLVGTHNGQIGNDPNRDILIASNWYFNHLKDKTLTCDWYFVPTD

SEQ ID NO: 150 - protein, 1297 aa, Clostridium botulinum; identical to SEQ ID NO: 7
  misc_feature (7)..(7): Xaa can be any naturally occurring amino acid

SEQ ID NO: 151 - protein, 448 aa, Clostridium botulinum
MPFVNKQFNYKDPVNGVDIAYIKIPNAGQMQVKAFKIHNKIWVIPERDTFTNPEEGDLNPPPEAKQVPVSYYDSTYLSTDNEKDNYLKGVTKLFERIYSTDLGRMLLTSIVRGIPFWGGSTIDTELKVIDTNCINVIQPDGSYRSEELNLVIIGPSADIIQFECKSFGHEVLNLTRNGYGSTQYIRFSPDFTFGFEESLEVDTNPLLGAGKFATDPAVTLAHELIHAGHRLYGIAINPNRVFKVNTNAYYEMSGLEVSFEELRTFGGHDAKFIDSLQENEFRLYYYNKFKDIASTLNKAKSIVGTTASLQYMKNVFKEKYLLSEDTSGKFSVDKLKFDKLYKMKTEIYTEDDNFVKFFKVLNRKTYLNFDKAVFKINIVPKVNYTIYDGFNLRNTNLAANFNGQNTEINNMNFTKLKNFTGLFEFYKLLCVRGIITSKTKSLDEGYNK

SEQ ID NO: 152 - protein, 1278 aa, Clostridium botulinum
MPVVINSFNYNDPVNDDTILYMQIPYEEKSKKYYKAFEIMRNVWIIPERNTIGTDPSDFDPPASLENGSSAYYDPNYLTTDAEKDRYLKTTIKLFKRINSNPAGEVLLQEISYAKPYLGNEHTPINEFHPVTRTTSVNIKSSTNVKSSIILNLLVLGAGPDIFENSSYPVRKLMDSGGVYDPSNDGFGSINIVTFSPEYEYTFNDISGGYNSSTESFIADPAISLAHELIHALHGLYGARGVTYKETIKVKQAPLMIAEKPIRLEEFLTFGGQDLNIITSAMKEKIYNNLLANYEKIATRLSRVNSAPPEYDINEYKDYFQWKYGLDKNADGSYTVNENKFNEIYKKLYSFTEIDLANKFKVKCRNTYFIKYGFLKVPNLLDDDIYTVSEGFNIGNLAVNNRGQNIKLNPKIIDSIPDKGLVEKIVKFCKSVIPRKGTKAPPRLCIRVNNRELFFVASESSYNENDINTPKEIDDTTNLNNNYRNNLDEVILDYNSETIPQISNQTLNTLVQDDSYVPRYDSNGTSEIEEHNVVDLNVFFYLHAQKVPEGETNISLTSSIDTALSEESQVYTFFSSEFINTINKPVHAALFISWINQVIRDFTTEATQKSTFDKIADISLVVPYVGLALNIGNEVQKENFKEAFELLGAGILLEFVPELLIPTILVFTIKSFIGSSENKNKIIKAINNSLMERETKWKEIYSWIVSNWLTRINTQFNKRKEQMYQALQNQVDAIKTVIEYKYNNYTSDERNRLESEYNINNIREELNKKVSLAMENIERFITESSIFYLMKLINEAKVSKLREYDEGVKEYLLDYISEHRSILGNSVQELNDLVTSTLNNSIPFELSSYTNDKILILYFNKLYKKIKDNSILDMRYENNKFIDISGYGSNISINGDVYIYSTNRNQFGIYSSKPSEVNIAQNNDIIYNGRYQNFSISFWVRIPKYFNKVNLNNEYTIIDCIRNNNSGWKISLNYNKIIWTLQDTAGNNQKLVFNYTQMISISDYINKWIFVTITNNRLGNSRIYINGNLIDEKSISNLGDIHVSDNILFKIVGCNDTRYVGIRYFKVFDTELGKTEIETLYSDEPDPSILKDFWGNYLLYNKRYYLLNLLRTDKSITQNSNFLNINQQRGVYQKPNIFSNTRLYTGVEVIIRKNGSTDISNTDNFVRKNDLAYINVVDRDVEYRLYADISIAKPEKIIKLIRTSNSNNSLGQIIVMDSIGNNCTMNFQNNNGGNIGLLGFHSNNLVASSWYYNNIRKNTSSNGCFWSFISKEHGWQEN

SEQ ID NO: 153 - protein, 260 aa, Clostridium botulinum
MQFVNKQFNYKDPVNGVDIAYIKIPNVGQMQPVKAFKIHNKIWVIPERDTFTNPEEGDLNPPPEAKQVPVSYYDSTYLSTDNEKDNYLKGVTKLFERIYSTDLGRMLLTSIVRGIPFWGGSTIDTELKVIDTNCINVIQPDGSYRSEELNLVIIGPSADIIQFECKSFGHEVLNLTRNGYGSTQYIRFSPDFTFGFEESLEVDTNPLLGAGKFATDPAVTLAHELIHAGHRLYGIAINPNRVFKVNTNAYYEMSGLEVSF

SEQ ID NO: 154 - protein, 871 aa, Clostridium botulinum
MQFVNKQFNYKDPVNGVDIAYIKIPNAGQMQPVKAFKIHNKIWVIPERDTFTNPEEGDLNPPPEAKQVPVSYYDSTYLSTDNEKDNYLKGVTKLFERIYSTDLGRMLLTSIVRGIPFWGGSTIDTELKVIDTNCINVIQPDGSYRSEELNLVIIGPSADIIQFECKSFGHEVLNLTRNGYGSTQYIRFSPDFTFGFEESLEVDTNPLLGAGKFATDPAVTLAHELIHAGHRLYGIAINPNRVFKVNTNAYYEMSGLEVSFEELRTFGGHDAKFIDSLQENEFRLYYYNKFKDIASTLNKAKSIVGTTASLQYMKNVFKEKYLLSEDTSGKFSVDKLKFDKLYKMLTEIYTEDNFVKFFKVLNRKTYLNFDKAVFKINIVPKVNYTIYDGFNLRNTNLAANFNGQNTEINNMNFTKLKNFTGLFEFYKLLCVRGIITSKTKSLDKGYNKALNDLCIKVNNWDLFFSPSEDNFTNDLNKGEEITSDTNIEAAEENISLDLIQQYYLTFNFDNEPENISIENLSSDIIGQLELMPNIERFPNGKKYELDKYTMFHYLRAQEFEHGKSRIALTNSVNEALLNPSRVYTFFSSDYVKKVNKATEAAMFLGWVEQLVYDFTDETSEVSTTDKIADITIIIPYIGPALNIGNMLYKDDFVGALIFSGAVILLEFIPEIAIPVLGTFALVSYIANKVLTVQTIDNALSKRNEKWDEVYKYIVTNWLAKVNTQIDLIRKKMKEALENQAEATKAIINYQYNQYTEEEKNNINFNIDDLSSKLNESINKAMININKFLNQCSVSYLMNSMIPYGVKRLEDFDASLKDALLKYIYDNRGTLIGQVDRLKDKVNNTLSTDIPFQLSKYVDNQRLLSTFTEYIK

SEQ ID NO: 155 - protein, 252 aa, Clostridium botulinum
MPKINSFNYNDPVNDRTILYIKPGGCQEFYKSFNIMKNIWIIPERNVIGTTPQDFHPPTSLKNGDSSYYDPNYLQSDEEKDRFLKIVTKIFNRINNNLSGGILLEELSKANPYLGNDNTPDNQFHIGDASAVEIKFSNGSQDILLPNVIIMGAEPDLFETNSSNISLRNNYMPSNHGFGSIAIVTFSPEYSFRFNDNSMNEFIQDPALTLMHELIHSLHGLYGAKGITTMYTITQKQNPLITNIRGTNIEEF

SEQ ID NO: 156 - protein, 1268 aa, Clostridium barati
MPVNINNFNYNDPINNTTILYMKMPYYEDSNKYYKAFEIMDNVWIIPERNIIGKKPSDFYPPISLDSGSSAYYDPNYLTTDAEKDRFLKTVIKLFNRINSNPAGQVLLEEIKNGKPYLGNDHTAVNEFCANNRSTSVEIKESNGTTDSMLLNLVILGPGPNILECSTFPVRIFPNNIAYDPSEKGFGSIQLMSFSTEYEYAFNDNTDLFIADPAISLAHELIHVLHGLYGAKGVTNKKVIEVDQGALMAAEKDIKIEEFITFGGQDLNIITNSTNQKIYVILLSNYTAIASRLSQVNRNNSALNTTYYKNFFQWKYGLDQDSNGNYTVNISKFNAIYKKLFSFTECDLAQKFQVKNRSNYLFHFKPFRLLDLLDDNIYSISEGFNIGSLRVNNNGQNINLNSRIVGPIPDNGLVERFVGLCKSIVSKKGTKNSLCIKVNNRDLFFVASESSYNENGINSPKEIDDTTITNNNYKKNLDEVILDYNSDAIPNLSSRLLNTTAQNDSYVPKYDSNGTSEIKEYTVDKLNVFFYLYAQKAPEGESAISLTSSVNTALLDASKVYTFFSSDFINTVNKPVQAALFISWIQQVINDFTTEATQKSTIDKIADISLIVPYVGLALNIGNEVQKGNFKEAIELLGAGILLEFVPELLIPTILVFTIKSFINSDDSKNKIIKAINNALRERELKWKEVYSWIVSNWLTRINTQFNKRKEQMYQALQNQVDGIKKIIEYKYNNYTLDEKNRLRAEYNIYSIKEELNKKVSLAMQNIDRFLTESSISYLMKLINEAKINKLSEYDKRVNQYLLNYILENSSTLGTSSVPELNNLVSNTLNNSIPFELSEYTNDKILIHILIRFYKRIIDSSILNMKYENNRFIDSSGYGSNISINGDIYIYSTNRNQFGIYSSRLSEVNITQNNTIIYNSRYQNFSVSFWVRIPKYNNLKNLNNEYTIINCMRNNNSGWKISLNYNNIIWTLQDTTGNNQKLVFNYTQMIDISDYINKWTFVTITNNRLGHSKLYINGNLTDQKSILNLGNIHVDDNILFKIVGCNDTRYVGIRYFKIFNMELDKTEIETLYHSEPDSTILKDFWGNYLLYNKKYYLLNLLKPNMSVTKNSDILNINRQRGIYSKTNIFSNARLYTGVEVIIRKVGSTDTSNTDNFVRKNDTVYINVVDGNSEYQLYADVSTSAVEKTIKLRRISNSNYNSNQMIIMDSIGDNCTMNFKTNNGNDIGLLGFHLNNLVASSWYYKNIRNNTRNNGCFWSFISKEHGWQE

SEQ ID NO: 157 - protein, 1295 aa, Clostridium botulinum [sequence omitted]

SEQ ID NO: 158 - protein, 1296 aa, Clostridium botulinum
MQFVNKQFNYKDPVNGVDIAYIKIPNVGQMQPVKAFKIHNKIWVIPERDTFTNPEEGDLNPPPEAKQVPVSYYDSTYLSTDNEKDNYLKGVTKLFERIYSTDLGRMLLTSIVRGIPFWGGSTIDTELKVIDTNCINVIQPDGSYRSEELNLVIIGPSADIIQFECKSFGHEVLNLTRNGYGSTQYIRFSPDFTFGFEESLEVDTNPLLGAGKFATDPAVTLAHELIHAGHRLYGIAINPNRVFKVNTNAYYEMSGLEVSFEELRTFGGHDAKFIDSLQENEFRLYYYNKFKDIASTLNKAKSIVGTTASLQYMKNVFKEKYLLSEDTSGKFSVDKLKFDKLYKMLTEIYTEDNFVKFFKVLNRKTYLNFDKAVFKINIVPKVNYTIYDGFNLRNTNLAANFNGQNTEINNMNFTKLKNFTGLFEFYKLLCVRGIITSKTKSLDKGYNKALNDLCIKVNNWDLFFSPSEDNFTNDLNKGEEITSDTNIEAAEENISLDLIQQYYLTFNFDNEPENISIENLSSDIIGQLELMPNIERFPNGKKYELDKYTMFHYLRAQEFEHGKSRIALTNSVNEALLNPSRVYTFFSSDYVKKVNKATEAAMFLGWVEQLVYDFTDETSEVSTTDKIADITIIIPYIGPALNIGNMLYKDDFVGALIFSGAVILLEFIPEIAIPVLGTFALVSYIANKVLTVQTIDNALSKRNEKWDEVYKYIVTNWLAKVNTQIDLIRKKMKEALENQAEATKAIINYQYNQYTEEEKNNINFNIDDLSSKLNESINKAMININKFLNQCSVSYLMNSMIPYGVKRLEDFDASLKDALLKYIYDNRGTLIGQVDRLKDKVNNTLSTDIPFQLSKYVDNQRLLSTFTEYIKNIINTSILNLRYESNHLIDLSRYASKINIGSKVNFDPIDKNQIQLFNLESSKIEVILKNAIVYNSMYENFSTSFWIRIPKYFNSISLNNEYTIINCMENNSGWKVSLNYGEIIWTLQDTQEIKQRVVFKYSQMINISDYINRWIFVTITNNRLNNSKIYINGRLIDQKPISNLGNIHASNNIMFKLDGCRDTHRYIWIKYFNLFDKELNEKEIKDLYDNQSNSGILKDFWGDYLQYDKPYYMLNLYDPNKYVDVNNVGIRGYMYLKGPRGSVMTTNIYLNSSLYRGTKFIIKKYASGNKDNIVRNNDRVYINVVVKNKEYRLATNASQAGVEKILSALEIPDVGNLSQVVVMKSKNDQGITNKCKMNLQDNNGNDIGFIGFHQFNNIAKLVASNWYNRQIERSSRTLGCSWEFIPVDDGWGERPL

SEQ ID NO: 159 - protein, 1296 aa, Clostridium botulinum [sequence omitted]

SEQ ID NO: 160 - protein, 1296 aa, Clostridium botulinum
MPFVNKQFNYKDPVNGVDIAYIKIPNAGQMQPVKAFKIHNKIWVIPERDTFTNPEEGDLNPPPEAKQVPVSYYDSTYLSTDNEKDNYLKGVTKLFERIYSTDLGRMLLTSIVRGIPFWGGSTIDTELKVIDTNCINVIQPDGSYRSEELNLVIIGPSADIIQFECKSFGHEVLNLTRNGYGSTQYIRFSPDFTFGFEESLEVDTNPLLGAGKFATDPAVTLAHELIHAGHRLYGIAINPNRVFKVNTNAYYEMSGLEVSFEELRTFGGHDAKFIDSLQENEFRLYYYNKFKDIASTLNKAKSIVGTTASLQYMKNVFKEKYLLSEDTSGKFSVDKLKFDKLYKMLTEIYTEDNFVKFFKVLNRKTYLNFDKAVFKINIVPKVNYTIYDGFNLRNTNLAANFNGQNTEINNMNFTKLKNFTGLFEFYKLLCVRGIITSKTKSLDKGYNKALNDLCIKVNNWDLFFSPSEDNFTNDLNKGEEITSDTNIEAAEENISLDLIQQYYLTFNFDNEPENISIENLSSDIIGQLELMPNIERFPNGKKYELDKYTMFHYLRAQEFEHGKSRIALTNSVNEALLNPSRVYTFFSSDYVKKVNKATEAAMFLGWVEQLVYDFTDETSEVSTTDKIADITIIIPYIGPALNIGNMLYKDDFVGALIFSGAVILLEFIPEIAIPVLGTFALVSYIANKVLTVQTIDNALSKRNEKWDEVYKYIVTNWLAKVNTQIDLIRKKMKEALENQAEATKAIINYQYNQYTEEEKNNINFNIDDLSSKLNESINKAMININKFLNQCSVSYLMNSMIPYGVKRLEDFDASLKDALLKYIYDNRGTLIGQVDRLKDKVNNTLSTDIPFQLSKYVDNQRLLSTFTEYIKNIINTSILNLRYESNHLIDLSRYASKINIGSKVNFDPIDKNQIQLFNLESSKIEVILKNAIVYNSMYENFSTSFWIRIPKYFNSISLNNEYTIINCMENNSGWKVSLNYGEIIWTLQDTQEIKQRVVFKYSQMINISDYINRWIFVTITNNRLNNSKIYINGRLIDQKPISNLGNIHASNNIMFKLDGCRDTHRYIWIKYFNLFDKELNEKEIKDLYDNQSNSGILKDFWGDYLQYDKPYYMLNLYDPNKYVDVNNVGIRGYMYLKGPRGSVMTTNIYLNSSLYRGTKFIIKKYASGNKDNIVRNNDRVYINVVVKNKEYRLATNASQAGVEKILSALEIPDVGNLSQVVVMKSKNDQGITNKCKMNLQDNNGNDIGFIGFHQFNNIAKLVASNWYNRQIERSSRTLGCSWEFIPVDDGWGERPL

SEQ ID NO: 161 - protein, 43 aa, Clostridium botulinum
MKINGNLNIDSPVDNKNVAIVRSRKSDVFFKAFQVAPNIWIVP

SEQ ID NO: 162 - protein, 1280 aa, Clostridium botulinum
MPVVINSFNYNDPVNDETILYMQKPYEERSRKYYKAFEIMPNVWIMPERDTIGTKPDEFQVPDSLKNGSSAYYDPNYLTTDAEKDRYLKTMIKLFNRINSNPTGKVLLEEVSNARPYLGDDDTLINEFLPVNVTTSVNIKFSTDVESSIISNLLVLGAGPDIFKAYCTPLVRFNKSDKLIEPSNHGFGSINILTFSPEYEHIFNDISGGNHNSTESFIADPAISLAHELIHALHGLYGAKAVTHKESLVAERGPLMIAEKPIRLEEFLTFGGEDLNIIPSAMKEKIYNDLLANYEKIATRLREVNTAPPGYDINEYKDYFQWKYGLDRNADGSYTVNRNKFNEIYKKLYSFTEIDLANKFKVKCRNTYFIKYGFVKVPNLLDDDIYTVSEGFNIGNLAVNNRGQNINLNPKIIDSIPDKGLVEKIIKFCKSIIPRKGTKQSPSLCIRVNNRELFFVASESSYNESDINTPKEIDDTTNLNNNYRNNLDEVILDYNSETIPQISNRTLNTLVQDNSYVPRYDSNGTSEIEEYDVVDFNVFFYLHAQKVPEGETNISLTSSIDTALLEESKVYTFFSSEFIDTINKPVNAALFIDWISKVIRDFTTEATQKSTVDKIADISLIVPYVGLALNIVIEAEKGNFEEAFELLGAGILLEFVPELTIPVILVFTIKSYIDSYENKNKAIKAINNSLIEREAKWKEIYSWIVSNWLTRINTQFNKRKEQMYQALQNQVDAIKTAIEYKYNNYTSDEKNRLESKYNINNIEEELNKKVSLAMKNIERFMTESSISYLMKLINEAEVGKLKEYDKHVKSDLLDYILYHKLILGEQTKELIDLVTSTLNSSIPFELSSYTNDKILIIYFNRLYKKIKDSSILDMRYENNKFIDISGYGSNISINGNVYIYSTNRNQFGIYSGRLSEVNIAQNNDIIYNSRYQNFSISFWVTIPKHYRPMNRNREYTIINCMGNNNSGWKISLRTIRDCEIIWTLQDTSGNKEKLIFRYEELASISDYINKWIFVTITNNRLGNSRIYINGNLIVEKSISNLGDIHVSDNILFKIVGCDDETYVGIRYFKVFNTELDKTEIETLYSNEPDPSILKDYWGNYLLYNKKYYLFNLLRKDKYITRNSGILNINQQRGVTGGISVFLNYKLYEGVEVIIRKNAPIDISNTDNFVRKNDLAYINVVDHGVEYRLYADISITKSEKIIKLIRTSNPNDSLGQIIVMDSIGNNCTMNFQNNDGSNIGLLGFHSDDLVASSWYYNHIRRNTSSNGCFWSFISKEHGWKE

SEQ ID NO: 163 - protein, 211 aa, Clostridium botulinum
AFKITDRIWIIPERYTFGYKPEDFNKSSGIFNRDVCEYYDPDYLNTNDKKNIFLQTMIKLFNRIKSKPLGEKLLEMIINGIPYLGDRRVPLEEFNTNIASVTVNKLISNPGEVERKKGIFANLIIFGPGPVLNENETIDIGIQNHFASREGFGGIMQMKFCPEYVSVFNNVQENKGASIFNRGGYFSDPSLILMHELIHVLHGLYGIKVDD

SEQ ID NO: 164 - protein, 1276 aa, Clostridium botulinum
MTWPVKDFNYSDPVNDNDILYLRIPQNKLITTPVKAFMITQNIWVIPERFSSDTNPSLSKPPRPTSKYQSYYDPSYLSTDEQKDTFLKGIIKLFKRINERDIGKKLINYLVVGSPFMGDSSTPEDTFDFTRHTTNIAVEKFENGSWKVTNIITPSVLIFGPLPNILDYTASLTLQGQQSNPSFEGFGTLSILKVAPEFLLTFSDVTSNQSSAVLGKSIFCMDPVIALMHELTHSLHQLYGINIPSDKRIRPQVSEGFFSQDGPNVQFEELYTFGGLDVEIIPQIERSQLREKALGHYKDIAKRLNNINKTIPSSWISNIDKYKKIFSEKYNFDKDNTGNFVVNIDKFNSLYSDLTNVMSEVVYSSQYNVKNRTHYFSRHYLPVFANILDDNIYTIRDGFNLTNKGFNIENSGQNIERNPALQKLSSESVVDLFTKVCLRLTKNSRDDSTCIKVKNNRLPYVADKDSISQEIFENKIITDETNVQNYSDNFSLDESILDGQVPINPEIVDPLLPNVNMEPLNLPGEEIVFYDDITKYVDYLNSYYYLESQKLSNNVENITLTTSVEEALGYSNKIYTFLPSLAEKVNKGVQAGLFLNWANEVVEDFTTNIMKKDTLDKISDVSVIIPYIGPALNIGNSALRGNFKQAFATAGVAFLLEGFPEFTIPALGVFTFYSSIQEREKIIKTIENCLEQRVKRWKDSYQWMVSNWLSRITTQFNHINYQMYDSLSYQADAIKAKIDLEYKKYSGSDKENIKSQVENLKNSLDVKISEAMNNINKFIRECSVTYLFKNMLPKVIDELNKFDLRTKTELINLIDSHNIILVGEVDRLKAKVNESFENTMPFNIFSYTNNSLLKDIINEYFNSINDSKILSLQNKKNALVDTSGYNAEVRVGDNVQLNTIYTNDFKLSSSGDKIIVNLNNNILYSAIYENSSVSFWIKISKDLTNSHNEYTIINSIEQNSGWKLCIRNGNIEWILQDVNRKYKSLIFDYSESLSHTGYTNKWFFVTITNNIMGYMKLYINGELKQSQKIEDLDEVKLDKTIVFGIDENIDENQMLWIRDFNIFSKELSNEDINIVYEGQILRNVIKDYWGNPLKFDTEYYIINDNYIDRYIAPESNVLVLVRYPDRSKLYTGNPITIKSVSDKNPYSRILNGDNIILHMLYNSRKYMIIRDTDTIYATQGGECSQNCVYALKLQSNLGNYGIGIFSIKNIVSKNKYCSQIFSSFRENTMLLADIYKPWRFSFKNAYTPVAVTNYETKLLSTSSFWKFISRDPGWVE

SEQ ID NO: 165 - protein, 1285 aa, Clostridium botulinum
MTWPVKDFNYSDPVNDNDILYLRIPQNKLITTPVKAFMITQNIWVIPERFSSDTNPSLSKPPRPTSKYQSYYDPSYLSTDEQKDTFLKGIIKLFKRINERDIGKKLINYLVVGSPFMGDSSTPEDTFDFTRHTTNIAVEKFENGSWKVTNIITPSVLIFGPLPNILDYTASLTLQGQQSNPSFEGFGTLSILKVAPEFLLTFSDVTSNQSSAVLGKSIFCMDPVIALMHELTHSLHQLYGINIPSDKRIRPQVSEGFFSQDGPNVQFEELYTFGGSDVEIIPQIERLQLREKALGHYKDIAKRLNNINKTIPSSWSSNIDKYKKIFSEKYNFDKDNTGNFVVNIDKFNSLYSDLTNVMSEVVYSSQYNVKNRTHYFSKHYLPVFANILDDNIYTIINGFNLTTKGFNIENSGQNIERNPALQKLSSESVVDLFTKVCLRLTRNSRDDSTCIQVKNNTLPYVADKDSISQEIFESQIITDETNVENYSDNFSLDESILDAKVPTNPEAVDPLLPNVNMEPLNVPGEEEVFYDDITKDVDYLNSYYYLEAQKLSNNVENITLTTSVEEALGYSNKIYTFLPSLAEKVNKGVQAGLFLNWANEVVEDFTTNIMKKDTLDKISDVSAIIPYIGPALNIGNSALRGNFKQAFATAGVAFLLEGFPEFTIPALGVFTFYSSIQEREKIIKTIENCLEQRVKRWKDSYQWMVSNWLSRITTRFNHISYQMYDSLSYQADAIKAKIDLEYKKYSGSDKENIKSQVENLKNSLDVKISEAMNNINKFIRECSVTYLFKNMLPKVIDELNKFDLKTKTELINLIDSHNIILVGEVDRLKAKVNESFENTIPFNIFSYTNNSLLKDMINEYFNSINDSKILSLQNKKNTLMDTSGYNAEVRVEGNVQLNPIFPFDFKLGSSGDDRGKVIVTQNENIVYNAMYESFSISFWIRINKWVSNLPGYTIIDSVKNNSGWSIGIISNFLVFTLKQNENSEQDINFSYDISKNAAGYNKWFFVTITTNMMGNMMIYINGKLIDTIKVKELTGINFSKTITFQMNKIPNTGLITSDSDNINMWIRDFYIFAKELDDKDINILFNSLQYTNVVKDYWGNDLRYDKEYYMINVNYMNRYMSKKGNGIVFNTRKNNNDFNEGYKIIIKRIRGNTNDTRVRGENVLYFNTTIDNKQYSLGMYKPSRNLGTDLVPLGALDQPMDEIRKYGSFIIQPCNTFDYYASQLFLSSNATTNRLGILSIGSYSFKLGDDYWFNHEYLIPVIKIEHYASLLESTSTHWVFVPASE

SEQ ID NO: 166 - protein, 1285 aa, Clostridium botulinum
MTWPVKDFNYSDPVNDNDILYLRIPQNKLITTPVKAFMITQNIWVIPERFSSDTNPSLSKPPRPTSKYQSYYDPSYLSTDEQKDTFLKGIIKLFKRINERDIGKKLINYLVVGSPFMGDSSTPEDTFDFTRHTTNIAVEKFENGSWKVTNIITPSVLIFGPLPNILDYTASLTLQGQQSNPSFEGFGTLSILKVAPEFLLTFSDVTSNQSSAVLGKSIFCMDPVIALMHELTHSLHQLYGINIPSDKRIRPQVSEGFFSQDGPNVQFEELYTFGGSDVEIIPQIERLQLREKALGHYKDIAKRLNNINKTIPSSWSSNIDKYKKIFSEKYNFDKDNTGNFLVNIDKFNSLYSDLTNVMSEVIYSSQYNVKNRTHYFSKHYLPVFANILDDNIYTIINGFNLTTKGFNIENSGQNIERNPALQKLSSESVVDLFTKVCLRLTRNSRDDSTCIQVKNNTLPYVADKDSISQEIFESQIITDETNVENYSDNFSLDESILDAKVPTNPEAVDPLLPNVNMEPLNVPGEEEVFYDDITKDVDYLNSYYYLEAQKLSNNVENITLTTSVEEALGYSNKIYTFLPSLAEKVNKGVQAGLFLNWANEVVEDFTTNIMKKDTLDKISDVSAIIPYIGPALNIGNSALRGNFKQAFATAGVAFLLEGFPEFTIPALGVFTFYSSIQEREKIIKTIENCLEQRVKRWKDSYQWMVSNWLSRITTQFNHISYQMYDSLSYQADAIKAKIDLEYKKYSGSDKENIKSQVENLKNSLDVKISEAMNNINKFIRECSVTYLFKNMLPKVIDELNKFDLKTKTELINLIDSHNIILVGEVDRLKAKVNESFENTIPFNIFSYTNNSLLKDMINEYFNSINDSKILSLQNKKNTLMDTSGYNAEVRVEGNVQLNPIFPFDFKLGSSGDDRGKIIVTQNENIVYNAMYESFSISFWIRINKWVSNLPGYTIIDSVKNNSGWSIGIISNFLVFTLKQNENSEQDINFSYDISKNAAGYNKWFFVTITTNMMGNMMIYINGKLIDTIKVKELTGINFSKTITFQMNKIPNTGLITSDSDNINMWIRDFYIFAKELDDKDINILFNSLQYTNVVKDYWGNDLRYDKEYYMINVNYMNRYMSKKGNGIVFNTRKNNNDFNEGYKIIIKRIRGNTNDTRVRGENVLYFNTTIDNKQYSLGMYKPSRNLGTDLVPLGALDQPMDEIRKYGSFIIQPCNTFDYYASQLFLSSNATTNRLGILSIGSYSFKLGDDYWFNHEYLIPVIKIEHYASLLESTSTHWVFVPASE

SEQ ID NO: 167 - protein, 1275 aa, Clostridium botulinum D phage
MTWPVKDFNYSDPVNDNDILYLRIPQNKLITTPVKAFMITQNIWVIPERFSSDTNPSLSKPPRPTSKYQSYYDPSYLSTDEQKDTFLKGIIKLFKRINERDIGKKLINYLVVGSPFMGDSSTPEDTFDFTRHTTNIAVEKFENGSWKVTNIITPSVLIFGPLPNILDYTASLTLQGQQSNPSFEGFGTLSILKVAPEFLLTFSDVTSNQSSAVLGKSIFCMDPVIALMHELTHSLHQLYGINIPSDKRIRPQVSEGFFSQDGPNVQFEELYTFGGLDVEIIPQIERSQLREKALGHYKDIAKRLNNINKTIPSSWISNIDKYKKIFSEKYNFDKDNTGNFVVNIDKFNSLYSDLTNVMSEVVYSSQYNVKNRTHYFSRHYLPVFANILDDNIYTIRDGFNLTNKGFNIENSGQNIERNPALQKLSSESVVDLFTKVCLRLTKNSRDDSTCIKVKNNRLPYVADKDSISQEIFENKIITDETNVQNYSDKFSLDESILDGQVPINPEIVDPLLPNVNMEPLNLPGEEIVFYDDITKYVDYLNSYYYLESQKLSNNVENITLTTSVEEALGYSNKIYTFLPSLAEKVNKGVQAGLFLNWANEVVEDFTTNIMKKDTLDKISDVSVIIPYIGPALNIGNSALRGNFNQAFATAGVAFLLEGFPEFTIPALGVFTFYSSIQEREKIIKTIENCLEQRVKRWKDSYQWMVSNWLSRITTQFNHINYQMYDSLSYQADAIKAKIDLEYKKYSGSDKENIKSQVENLKNSLDVKISEAMNNINKFIRECSVTYLFKNMLPKVIDELNKFDLRTKTELINLIDSHNIILVGEVDRLKAKVNESFENTMPFNIFSYTNNSLLKDIINEYFNSINDSKILSLQNKKNALVDTSGYNAEVRVGDNVQLNTIYTNDFKLSSSGDKIIVNLNNNILYSAIYENSSVSFWIKISKDLTNSHNEYTIINSIEQNSGWKLCIRNGNIEWILQDVNRKYKSLIFDYSESLSHTGYTNKWFFVTITNNIMGYMKLYINGELKQSQKIEDLDEVKLDKTIVFGIDENIDENQMLWIRDFNIFSKELSNEDINIVYEGQILRNVIKDYWGNPLKFDTEYYIINDNYIDRYIAPESNVLVLVQYPDRSKLYTGNPITIKSVSDKNPYSRILNGDNIILHMLYNSRKYMIIRDTDTIYATQGGECSQNCVYALKLQSNLGNYGIGIFSIKNIVSKNKYCSQIFSSFRENTMLLADIYKPWRFSFKNAYTPVAVTNYETKLLSTSSFWKFISRDPGWV

SEQ ID NO: 168 - protein, 1276 aa, Clostridium botulinum; identical to SEQ ID NO: 4

SEQ ID NO: 169 - protein, 369 aa, Clostridium botulinum
KLLSTFTEYIKNIINTSILNLRYESNHLIDLSRYASKINIKYFNSISLNNEYTIINCMENNSGWKVSLNYGEIIWTLQDTQEIKQRVVFKYSQMINISDYINRWIFVTITNNRLNNSKIYINGRLIDQKPISNLGNIHASNNIMFKLDGCRDTHRYIWIKYFNLFDKELNEKEIKDLYDNQSNSGILKDFWGDYLQYDKPYYMLNLYDPNKYVDVNNVGIRGYMYLKGPRGSVMTTNIYLNSSLYRGTKFIIKKYASGNKDNIVRNNDRVYINVVVKNKEYRLATNASQAGVEKILSALEIPDVGNLSQVVVMKSKNDQGITNKCKMNLQDNNGNDIGFIGFHQFNNIAKLVASNWYNRQIERSSRTLG

SEQ ID NO: 170 - protein, 623 aa, Clostridium botulinum
MSLSIKELYYTKDKSINNVNLADGNYVVNRGDGWILSRQNQNLGGNISNNGCTAIVGDLRIRETATPYYYPTASFNEEYIKNNVQNVFANFTEASEIPIGFEFSKTAPSNKSLYMYLQYTYIRYEIIKVLQNTVTERAVLYVPSLGYVKSIEFNSEEQIDKNFYFTSQDKCILNEKFIYKKIDDTITVKESKNSNNNINFNTSQTILPYPNGLYVINKGDGYMRTNDKDLIGTLLIESSTSGSIIQPRLRNTTRPLFNTSNPTIFSQEYTEARLNDAFNIQLFNTSTTLFKFVEEAPTNKNISMKVYNTYEKYELINYQNGNIDDKAEYYLPSLGKCEVSDAPSPQAPVVETPVDQDGFIQTGPNENIIVGVINPSENIEEISTPIPDDYTYNIPTSIQNNACYVLFKVNTTGVYKITTKNNLPPLIIYEAIGSSNRNMNSNNLSNDNIKAIKYITGLNRSDAKSYLIVSLFKDKNYYIRIPQISSSTTSQLIFKRELGNISDLADSTVNILDNLNTSGTHYYTRQSPDVGNYISYQLTIPGDFNNIASSIFSFRTRNNQGIGTLYRLTESINGYNLITINNYSDLLNNVEPISLLNGATYIFRVKVTELNNYNIIFDAYRNS

SEQ ID NO: 171 - protein, 623 aa, Clostridium botulinum; identical to SEQ ID NO: 170

SEQ ID NO: 172 - protein, 623 aa, Clostridium botulinum D phage
MSLSIKELYYTKDKSINNVNLADGNYVVNRGDGWILSRQNQNLGGNISNNGCTAIVGDLRIRETATPYYYPTASFNEEYIKNNVQNVFANFTEASEIPIGFEFSKTAPSNKSLYMYLQYTYIRYEIIKVLQNTVTEAAVLYVPSLGYVKSIEFNSEEQIDKNFYFTSQDKCILNEKFIYKKIDDTITVKESKNSNNNINFNTSQTILPYPNGLYVINKGDGYMRTNDKDLIGTLLIESSTSGSIIQPRLRNTTRPLFNTSNPTIFSQEYTEARLNDAFNIQLFNTSTTLFKFVEEAPTNKNISMKVYNTYEKYELINYQNGNIDDKAEYYLPSLGKCEVSDAPSPQAPVVETPVDQDGFIQTGPNENIIVGVINPSENIEEISTPIPDDYTYNIPTSIQNNACYVLFKVNTTGVYKITTKNNLPPLIIYEAIGSSNRNMNSNNLSNDNIKAIKYITGLNRSDAKSYLIVSLFKDKNYYIRIPQISSSTTSQLIFKRELGNISDLADSTVNILDNLNTSGTHYYTRQSPDVGNYISYQLTIPGDFNNIASSIFSFRTRNNQGIGTLYRLTESINGYNLITINNYSDLLNNVEPISLLNGATYIFRVKVTELNNYNIIFDAYRNS

SEQ ID NO: 173 - protein, 366 aa, Clostridium botulinum
VQKENFKEAFELLGAGILLEFVPELLIPTILVFTIKSFIGSSENKNKIIKAINNSLMERETKWKEIYSWIVSNWLTRINTQFNKRKEQMYQALQNQVDAIKTVIEYKYNNYTSDERNRLESEYNINNIREELNKKVSLAMENIERFITESSIFYLMKLINEAKVSKLREYDEGVKEYLLDYISEHRSILGNSVQELNDLVTSTLNNSIPFELSSYTNDKILILYFNKLYKKIKDNSILDMRYENNKFIDISGYGSNISINGDVYIYSTNRNQFGIYSSKPSEVNIAQNNDIIYNGRYQNFSISFWVRIPKYFNKVNLNNEYTIIDCIRNNNSGWKISLNYNKIIWTLQDTAGNNQKLVFNYTQMIS

SEQ ID NO: 174 - protein, 369 aa, Clostridium botulinum
AEKGNFEEAFELLGVGILLEFVPELTIPVILVFTIKSYIDSYENKNKAIKAINNSLIEREAKWKEIYSWIVSNWLTRINTQFNKRKEQMYQALQNQVDAIKTAIEYKYNNYTSDEKNRLESEYNINNIEEELNKKVSLAMKNIERFMTESSISYLMKLINEAKVGKLKKYDNHVKSDLLNYILDHRSILGEQTNELSDLVTSTLNSSIPFELSSYTNDKILIIYFNRLYKKIKDSSILDMRYENNKFIDISGYGSNISINGNVYIYSTNRNQFGIYNSRLSEVNIAQNNDIIYNSRYQNFSISFWVRIPKHYKPMNHNREYTIINCMGNNNSGWKISLRTVRDCEIIWTLQDTSGNKENLIFRYEELNR

SEQ ID NO: 175 - protein, 361 aa, Clostridium botulinum
TAKGNFESAFEIAGSSILLEFIPELLIPVVGVFLLESYIDNKNKIIKTIDNALTKRVEKWIDMYGLIVAQWLSTVNTQFYTIKEGMYKALNYQAQALEEIIKYKYNIYSEEEKSNININFNDINSKLNEGINQAMDNINDFINECSVSYLMKKMIPLAVKKLLDFDNTLKKNLLNYIDENKLYLIGSVEDEKSKVDKYLKTIIPFDLSMYTNNEILIKIFNKYNSEILNNIILNLRYRDNNLIDLSGYGAKVEVYDGVKLNDKNQFKLTSSADSKIRVTQNQNIIFNSMFLDFSVSFWIRIPKYRNDDIQNYIHNEYTIINCMKNNSGWKISIRGNRIIWTLIDINGKTKSVFFEYNIRED

SEQ ID NO: 176 - protein, 361 aa, Clostridium botulinum
TAKGNFESAFEIAGSSILLEFIPELLIPVVGVFLLESYIDNKNKIIKTIDNALTKRVEKWIDMYGLIVAQWLSTVNTQFYTIKEGMYKALNYQAQALEEIIKYKYNIYSEEEKSNININFNDINSKLNDGINQAMDNINDFINECSVSYLMKKMIPLAVKKLLDFDNTLKKNLLNYIDENKLYLIGSVEDEKSKVDKYLKTIIPFDLSTYTNNEILIKIFNKYNSEILNNIILNLRYRDNNLIDLSGYGAKVEVYDGVKLNDKNQFKLTSSADSKIRVTQNQNIIFNSMFLDFSVSFWIRIPKYRNDDIQNYIHNEYTIINCMKNNSGWKISIRGNRIIWTLIDINGKTKSVFFEYNIRED

SEQ ID NO: 177 - protein, 573 aa, Clostridium tetani
RSLEYQVDAIKKIIDYEYKIYSGPDKEQIADEINNLKNKLEEKANKAMININIFMRESSRSFLVNQMINEAKKQLLEFDTQSKNILMQYIKANSKFIGITELKKLESKINKVFSTPIPFSYSKNLDCWVDNEEDIDVILKKSTILNLDINNDIISDISGFNSSVITYPDAQLVPGINGKAIHLVNNESSEVIVHKAMDIEYNDMFNNFTVSFWLRVPKVSASHLEQYGTNEYSIISSMKKHSLSIGSGWSVSLKGNNLIWTLKDSAGEVRQITFRDLPDKFNAYLANKWVFITITNDRLSSANLYINGVLMGSAEITGLGAIREDNNITLKLDRCNNNNQYVSIDKFRIFCKALNPKEIEKLYTSYLSITFLRDFWGNPLRYDTEYYLIPVASSSKDVQLKNITDYMYLTNAPSYTNGKLNIYYRRLYNGLKFIIKRYTPNNEIDSFVKSGDFIKLYVSYNNNEHIVGYPKDGNAFNNLDRILRVGYNAPGIPLYKKMEAVKLRDLKTYSVQLKLYDDKNASLGLVGTHNGQIGNDPNRDILIASNWYFNHLKDKILGCDWYFVPTDEGWTND

SEQ ID NO: 178 - protein, 432 aa, Clostridium botulinum
MSYTNDKILILYFNKLYKKIKDNSILDMRYENNKFIDISGYGSNISINGDVYIYSTNRNQFGIYSSKPSEVNIAQNNDIIYNGRYQNFSISFWVRIPKYFNKVNLNNEYTIIDCIRNNNSGWKISLNYNKIIWTLQDTAGNNQKLVFNYTQMISISDYINKWIFVTITNNRLGNSRIYINGNLIDEKSISNLGDIHVSDNILFKIVGCNDTRYVGIRYFKVFDTELGKTEIETLYSDEPDPSILKDFWGNYLLYNKRYYLLNLLRTDKSITQNSNFLNINQQRGVYQKPNIFSNTRLYTGVEVIIRKNGSTDISNTDNFVRKNDLAYINVVDRDVEYRLYADISIAKPEKIIKLIRTSNSNNSLGQIIVMDSIGNNCTMNFQNNNGGNIGLLGFHSNNLVASSWYYNNIRKNTSSNGCFWSFISKEHGWQEN

SEQ ID NO: 179 - protein, 438 aa, Clostridium botulinum
MARLLSTFTEYIKNIINTSILNLRYESNHLIDLSRYASKINIGSKVNFDPIDKNQIQLFNLESSKIEVILKNAIVYNSMYENFSTSFWIRIPKYFNSISLNNEYTIINCMENNSGWKVSLNYGEIIWTLQDTQEIKQRVVFKYSQMINISDYINRWIFVTITNNRLNNSKIYINGRLIDQKPISNLGNIHASNNIMFKLDGCRDTHRYIWIKYFNLFDKELNEKEIKDLYDNQSNSGILKDFWGDYLQYDKPYYMLNLYDPNKYVDVNNVGIRGYMYLKGPRGSVMTTNIYLNSSLYRGTKFIIKKYASGNKDNIVRNNDRVYINVVVKNKEYRLATNASQAGVEKILSALEIPDVGNLSQVVVMKSKNDQGITNKCKMNLQDNNGNDIGFIGFHQFNNIAKLVASNWYNRQIERSSRTLGCSWEFIPVDDGWGERPL

SEQ ID NO: 180 - protein, 441 aa, Clostridium botulinum
EDIDVILKKSTILNLDINNDIISDISGFNSSVITYPDAQLVPGINGKAIHLVNNEESEVIVHKAMDIEYNDMFNNFTVSFWLRVPKVSASHLEQYGTNEYSIISSMKKHSLSIGSGWSVSLKGNNLIWTLKDSAGEVRQITFRDLPDKFNAYLANKWVFITITNDRLSSANLYINGVLMGSAEITGLGAIREDNNITLKLDRCNNNNQYVSIDKFRIFCKALNPKEIEKLYTSYLSITFLRDFWGNPLRYDTEYYLIPVASSSKDVQLKNITDYMYLTNAPSYTNGKLNIYYRRLYNGLKFIIKRYTPNNEIDSFVKSGDFIKLYVSYNNNEHIVGYPKDGNAFNNLDRILRVGYNAPGIPLYKKMEAVKLRDLKTYSVQLKLYDDKNASLGLVGTHNGQIGNDPNRDILIASNWYFNHLKDKILGCDWYFVPTDEGWTND

SEQ ID NO: 181 - protein, 472 aa, Clostridium botulinum
MGSSHHHHHHSSGLVPRGSHMKNLDCWVDNEEDIDVILKKSTILNLDINNDIISDISGFNSSVITYPDAQLVPGINGKAIHLVNNESSEVIVHKAMDIEYNDMFNNFTVSFWLRVPKVSASHLEQYGTNEYSIISSMKKHSLSIGSGWSVSLKGNNLIWTLKDSAGEVRQITFRDLPDKFNAYLANKWVFITITNDRLSSANLYINGVLMGSAEITGLGAIREDNNITLKLDRCNNNNQYVSIDKFRIFCKALNPKEIEKLYTSYLSITFLRDFWGNPLRYDTEYYLIPVASSSKDVQLKNITDYMYLTNAPSYTNGKLNIYYRRLYNGLKFIIKRYTPNNEIDSFVKSGDFIKLYVSYNNNEHIVGYPKDGNAFNNLDRILRVGYNAPGIPLYKKMEAVKLRDLKTYSVQLKLYDDKNASLGLVGTHNGQIGNDPNRDILIASNWYFNHLKDKILGCDWYFVPTDEGWTND

SEQ ID NO: 182 - protein, 469 aa, Clostridium tetani
MGHGHHHHHHHHHHSSGHIEGRHMLDNEEDIDVILKKSTILNLDINNDIISDISGFNSSVITYPDAQLVPGINGKAIHLVNNESSEVIVHKAMDIEYNDMFNNFTVSFWLRVPKVSASHLEQYGTNEYSIISSMKKHSLSIGSGWSVSLKGNNLIWTLKDSAGEVRQITFRDLPDKFNAYLANKWVFITITNDRLSSANLYINGVLMGSAEITGLGAIREDNNITLKLDRCNNNNQYVSIDKFRIFCKALNPKEIEKLYTSYLSITFLRDFWGNPLRYDTEYYLIPVASSSKDVQLKNITDYMYLTNAPSYTNGKLNIYYRRLYNGLKFIIKRYTPNNEIDSFVKSGDFIKLYVSYNNNEHIVGYPKDGNAFNNLDRILRVGYNAPGIPLYKKMEAVKLRDLKTYSVQLKLYDDKNASLGLVGTHNGQIGNDPNRDILIASNWYFNHLKDKILGCDWYFVPTDEGWTND

SEQ ID NO: 183 - protein, 441 aa, Clostridium botulinum
EDIDVILKKSTILNLDINNDIISDISGFNSSVITYPDAQLVPGINGKAIHLVNNESSEVIVHKAMDIEYNDMFNNFTVSFWLRVPKVSASHLEQYGTNEYSIISSMKKHSLSIGSGWSVSLKGNNLIWTLKDSAGEVRQITFRDLPDKFNAYLANKWVFITITNDRLSSANLYINGVLMGSAEITGLGAIREDNNITLKLDRCNNNNQYVSIDKFRIFCKALNPKEIEKLYTSYLSITFLRDFWGNPLRYDTEYYLIPVASSSKDVQLKNITDYMYLTNAPSYTNGKLNIYYRRLYNGLKFIIKRYTPNNEIDSFVKSGDFIKLYVSYNNNEHIVGYPKDGNAFNNLDRILRVGYNAPGIPLYKKMEAVKLRDLKTYSVQLKLYDDKNASLGLVGTHNGQIGNDPNRDILIASNWYFNHLKDKILGCDWYFVPTDEGWTND

SEQ ID NO: 184 - protein, 452 aa, Clostridium botulinum
MKNLDCWVDNEEDIDVILKKSTILNLDINNDIISDISGFNSSVITYPDAQLVPGINGKAIHLVNNESSEVIVHKAMDIEYNDMFNNFTVSFWLRVPKVSASHLEQYGTNEYSIISSMKKHSLSIGSGWSVSLKGNNLIWTLKDSAGEVRQITFRDLPDKFNAYLANKWVFITITNDRLSSANLYINGVLMGSAEITGLGAIREDNNITLKLDRCNNNNQYVSIDKFRIFCKALNPKEIEKLYTSYLSITFLRDFWGNPLRYDTEYYLIPVASSSKDVQLKNITDYMYLTNAPSYTNGKLNIYYRRLYNGLKFIIKRYTPNNEIDSFVKSGDFIKLYVSYNNNEHIVGYPKDGNAFNNLDRILRVGYNAPGIPLYKKMEAVKLRDLKTYSVQLKLYDDKNASLGLVGTHNGQIGNDPNRDILIASNWYFNHLKDKILGCDWYFVPTDEGWTND

SEQ ID NO: 185 - protein, 444 aa, Clostridium tetani
DNEEDIDVILKKSTILNLDINNDIISDISGFNSSVITYPDAQLVPGINGKAIHLVNNESSEVIVHKAMDIEYNDMFNNFTVSFWLRVPKVSASHLEQYGTNEYSIISSMKKHSLSIGSGWSVSLKGNNLIWTLKDSAGEVRQITFRDLPDKFNAYLANKWVFITITNDRLSSANLYINGVLMGSAEITGLGAIREDNNITLKLDRCNNNNQYVSIDKFRIFCKALNPKEIEKLYTSYLSITFLRDFWGNPLRYDTEYYLIPVASSSKDVQLKNITDYMYLTNAPSYTNGKLNIYYRRLYNGLKFIIKRYTPNNEIDSFVKSGDFIKLYVSYNNNEHIVGYPKDGNAFNNLDRILRVGYNAPGIPLYKKMEAVKLRDLKTYSVQLKLYDDKNASLGLVGTHNGQIGNDPNRDILIASNWYFNHLKDKILGCDWYFVPTDEGWTND

SEQ ID NO: 186 - protein, 451 aa, Clostridium tetani
KNLDCWVDNEEDIDVILKKSTILNLDINNDIISDISGFNSSVITYPDAQLVPGINGKAIHLVNNESSEVIVHKAMDIEYNDMFNNFTVSFWLRVPKVSASHLEQYDTNEYSIISSMKKYSLSIGSGWSVSLKGNNLIWTLKDSAGEVRQITFRDLSDKFNAYLANKWVFITITNDRLSSANLYINGVLMGSAEITGLGAIREDNNITLKLDRCNNNNQYVSIDKFRIFCKALNPKEIEKLYTSYLSITFLRDFWGNPLRYDTEYYLIPVAYSSKDVQLKNITDYMYLTNAPSYTNGKLNIYYRRLYSGLKFIIKRYTPNNEIDSFVRSGDFIKLYVSYNNNEHIVGYPKDGNAFNNLDRILRVGYNAPGIPLYKKMEAVKLRDLKTYSVQLKLYDDKDASLGLVGTHNGQIGNDPNRDILIASNWYFNHLKDKTLTCDWYFVPTDEGWTND

SEQ ID NO: 187 - protein, 56 aa, Clostridium botulinum
KKMIISNNIFISNCLTLSCGGKYICLSMKDENYNWMICNNESNIPKKAYLWTLKEV

SEQ ID NO: 188 - protein, 441 aa, Clostridium botulinum
YTNNTILIEIFNKYNSKILNNIILNLRYRDNNLIDLSGYGANVEVYDGVELNDKNQFKLTSSTNSEIRVTQNQNIIFNSMFLDFSVSFWIRIPKYKNDGIQNYIHNEYTIINCIKNNSGWKISIRGNRIIWTLTDINGKTKSVFFEYSIREDISDYINRWFFVTITNNSDNAKIYINGKLESNIDIKDIGEVIANGEIIFKLDGDIDRTQFIWMKYFSIFNTELSQSNIKEIYKIQSYSEYLKDFWGNPLMYNKEYYMFNAGNKNSYIKLKKDSSVGEILTRSKYNQNSNYINYRNLYIGEKFIIRRKSNSQSINDDIVRKEDYIYLDFFNSNREWRVYAYKDFKEEEKKLVLANIYDSNEFYKTIQIKEYDEQPTYSCQLLFKKDEESTDEIGLIGIHRFYESGIVLKDYKNYFCISKWYLKEVKRKPYNPNLGCNWQFI

SEQ ID NO: 189 - protein, 792 aa, Clostridium sp.
TFDFDNEPENISIENLSSDIIGQLEPMPNIERFPNGKKYELDKYTMFHYLRAQEFEHGDSRIILTNSAEEALLKPNVAYTFFSSKYVKKINKAVEAFMFLNWAEELVYDFTDETNEVTTMDKIADITIIVPYIGPALNIGNMLSKGEFVEAIIFTGVVAMLEFIPEYALPVFGTFAIVSYIANKVLTVQTINNALSKRNEKWDEVYKYTVTNWLAKVNTQIDLIREKMKKALENQAEATKAIINYQYNQYTEEEKNNINFNIDDLSSKLNESINSAMININKFLDQCSVSYLMNSMIPYAVKRLKDFDASVRDVLLKYIYDNRGTLVLQVDRLKDEVNNTLSADIPFQLSKYVDNKKLLSTFTEYIKNIVNTSILSIVYKKDDLIDLSRYGAKINIGDRVYYDSIDKNQIKLINLESSTIEVILKNAIVYNSMYENFSTSFWIKIPKYFSKINLNNEYTIINCIENNSGWKVSLNYGEIIWTLQDNKQNIQRVVFKYSQMVNISDYINRWIFVTITNNRLTKSKIYINGRLIDQKPISNLGNIHASNKIMFKLDGCRDPRRYIMIKYFNLFDKELNEKEIKDLYDSQSNSGILKDFWGNYLQYDKPYYMLNLFDPNKYVDVNNIGIRGYMYLKGPRGSVVTTNIYLNSTLYEGTKFIIKKYASGNEDNIVRNNDRVYINVVVKNKEYRLATNASQAGVEKILSALEIPDVGNLSQVVVMKSKDDQGIRNKCKMNLQDNNGNDIGFIGFHLYDNIAKLVASNWYNRQVGKASRTFGCSWEFIPVDDGWGESSL

SEQ ID NO: 190 - protein, 605 aa, Clostridium sp.
VQTINNALSKRNEKWDEVYKYTVTNWLAKVNTQIDLIREKMKKALENQAEATKAIINYQYNQYTEEEKNNINFNIDDLSSKLNESINSAMININKFLDQCSVSYLMNSMIPYAVKRLKDFDASVRDVLLKYIYDNRGTLVLQVDRLKDEVNNTLSADIPFQLSKYVDNKKLLSTFTEYIKNIVNTSILSIVYKKDDLIDLSRYGAKINIGDRVYYDSIDKNQIKLINLESSTIEVILKNAIVYNSMYENFSTSFWIKIPKYFSKINLNNEYTIINCIENNSGWKVSLNYGEIIWTLQDNKQNIQRVVFKYSQMVNISDYINRWIFVTITNNRLTKSKIYINGRLIDQKPISNLGNIHASNKIMFKLDGCRDPRRYIMIKYFNLFDKELNEKEIKDLYDSQSNSGILKDFWGNYLQYDKPYYMLNLFDPNKYVDVNNIGIRGYMYLKGPRGSVVTTNIYLNSTLYEGTKFIIKKYASGNEDNIVRNNDRVYINVVVKNKEYRLATNASQAGVEKILSALEIPDVGNLSQVVVMKSKDDQGIRNKCKMNLQDNNGNDIGFIGFHLYDNIAKLVASNWYNRQVGKASRTFGCSWEFIPVDDGWGESSL

SEQ ID NO: 191 - protein, 436 aa, Clostridium sp.
KLLSTFTEYIKNIVNTSILSIVYKKDDLIDLSRYGAKINIGDRVYYDSIDKNQIKLINLESSTIEVILKNAIVYNSMYENFSTSFWIKIPKYFSKINLNNEYTIINCIENNSGWKVSLNYGEIIWTLQDNKQNIQRVVFKYSQMVNISDYINRWIFVTITNNRLTKSKIYINGRLIDQKPISNLGNIHASNKIMFKLDGCRDPRRYIMIKYFNLFDKELNEKEIKDLYDSQSNSGILKDFWGNYLQYDKPYYMLNLFDPNKYVDVNNIGIRGYMYLKGPRGSVVTTNIYLNSTLYEGTKFIIKKYASGNEDNIVRNNDRVYINVVVKNKEYRLATNASQAGVEKILSALEIPDVGNLSQVVVMKSKDDQGIRNKCKMNLQDNNGNDIGFIGFHLYDNIAKLVASNWYNRQVGKASRTFGCSWEFIPVDDGWGESSL

SEQ ID NO: 192 - DNA, 29 bp, Clostridium sp.
ttctgagctcttacagtgcctttctcccc
